United States Patent Application Publication US 2026/0324648 A1 - sequence listing, part 4

SEQ ID NO: 16 - DNA, 4275344 bp, synthetic construct (residues 2,137,673-4,275,344 of 4,275,344)
  source 1..4275344: mol_type = other DNA
cgtagcgcgccggattagcggttaactcaacgctaagctgaccttcatccagatacaggttgaactccaaatcctccaccggcccagaagccatttgatgagtgatcccatcaataccggcaaaattcagctgatattcaaacagtttgaaattaatggttgggccatacaaatcctgccctgcaccaaccattccgagatcgcgccgcagttgatcggcttcgtaacgctggtggcgtcgcagcgttttcagctctagagccagattacgcgcgacttcggccagagtgagatcgtcgcgcattttcgcctgtagcggcagcacgttgaccaccggccccagcgcgccaatagccacagaacccattcggcgcataaatggaaaaccgacggaaagatgctgttgcccgctcatacgatacaaatagctcatcaccaaggcaatcgccatatccgccgcagatagacgctgcgactttaccgcttcagtaatggccgaaaattgggcgatatcagtggagaagtggtagcgcagcggcaaaggagagagattctgttcgccgctgtttttcccagaggaagacagacaaaccggcaccggcagctccgccgcgtgctgtaaccagaactcacgatccttagcttccgcttccgacccttgataggccagatattcggccaccacttcgctaaaagcggtaaacggattttcacctgcgggcaatccagacaccagcgcagtatagatctcagctatacgtcgcgttaatgcggtaaaactaaagccatccaccattaaatgatgataacgctgataccacaaccagcgctcttcgccttcaggccgatctttcgccggactcactcggaataacagatggcgataacccggaacattcgcagattcaggacgatccgctcccaaaagatccgcttccatcaaaacctgagcggcgagggcggcatcgtttcgatctcgccaatccaatatttccgcaggcgcgatctgcttaggatcgatggcctgaggaatccactgtaccggcccgttatcacccgtgccaaagcgggcgtggacaatatcggcctcggccagtccctgacggagcgcggcttgaaaatgtgccacatcgagatgaccacggagttcgatataatgcgcgacagcgtaagcgttattttggaccgcgatctgatcggcaaaccagatacccggttgagctgcgaccagcggtaattcgctttcgttcgcggccgaaaaagttagggttaaagcctctgacacggcaacaattccttatttggcaagtatcaagaatccggttattccggcgtctgtccatcggtcatgctgggctatctcattcggcgcagcctgtcagcggttacgcatctacagcgcgaaaaaaccgcctgacaaagcatttttaagggttttaggcgctgctagatgcaacatgacaagagataggtttttattccggttgagcattcatcaggcgctgagggcgcatatccgtccagttcatttccagatagcgtacgcaggcttcccttaccgccggaccaaataccggttcccaaccggcgggaatcgcagtgatttcaggccacaggctgtactggcgctgagcgttgatcagcacaaaaaagggaatgctttcatcatcaaaagggttcacttgggcttcattcatcatattaattactgtcatttttaagattgagtaaataatgcagaccatcgattaatccgccccgccagcacacggcatcatgcccgccagaataaaagcggcagtttacgcggtgaggggattgctctaatgcatgctgcatttcctgattaacctgataaatcacgtcttccctgcgccctgcctccataaagatatccagttgatgatcggctcccacgccttgctgaacttgctgagtaagccaaccggcaacttcagcgttgccgtcgggcatcagcgcggaatcatccatacacggccaccaaaatgaacctgactgactgagtacgcagccaaagcgctgcggccaatgtagcccagcatacagcgcggctaagccgccataactttgccctgcaaccacagtgcgtgaggccaggccactaaaaggctgatactgcgccaccagcggcagaagttcggcctgaatcgccaaccagaactcccgattacaaggcaactcttccccgcgatgctgctgatcgataacgtcaatcagcacataaacggtgggagggagctggccgctctcggtttgtcgatccaacacgccaaataccggctgcccctgcgcccaatattgcccatccagcaaaatagccaacggacgatcctgcggttgatcggtttccccagtggaatagatccaaatattgcgactattaccgagcaacttactgttccagaggatcttatgcagacgcgccggatcgactggcggcggattgccagcatcgacgtctttccaagcaggctgcggaagtgaagcgggaagatgtactgcagagagaggtgtgccacggttgctgtaatgtggtcgaattcgatttagcgggtcgctttctgccagatccagtaaagaaatccaccagttacgctgcgccatgcgccgctgctcatggctaccttccggcagttgcaaacactggctggcgctgaccggaatcacgctatagctaccgcgaaaatcaggctcaacctcagtctgccaataccacacatcggaatcaccgaggcgctttaggcattcaggcgtaaaactgtggtggtcagtgacaccgttaacatcaatataaactcggttgagggaagactgctgagcgtttccctgtgggtctcgccataaaaacgtcagttttacccgatctgtctctctaggttcaaccagaggagtgccccactgcgcaacctgttgccaccatgcctcactgccagcctgaggatcgcttaataagctttggctgtccggataactgttcactgcattcacaaccttccctcgctgtttcaactttctgtatcagtcctgaaaaccattaggcaggctaaagattgattcatatatatttagggatacaagcaaacacaaataatattgagaactatttgtgtttgcaataacatagttggcattcgctctaatacatcaacttatagtttgctcaccccataggcaaactggcggcgcttagcacaaaaataaagcggtaataccgtcgatgtactgattttggctggattggatggccttagagacactgcgttaaggtttggcaggaatgcgcgaacatacccagccgagcctgacaatacgtaataccgggtgaccttaagccctgattgcgcaaacacgctttttatttttattaattgtgttctaggtaagggataaatcatgttcgatctttctggcaaattgatgccaaggaaactaccgcttcgcgtcagctctacctctaagactttactatttacctctgcacttattcttattccgtctctcggcgctcaggccgagacgaataaaactgccaatgcgccgaaagaagataaattagtggtggttgcacaggcgggcagtggggaggaagattcaggttttgtagcgaccaatagctccacggggacgaaaaccgatactccactgattaaaacacctcaggccatctccgttgttacccgtgagcaaatggcggcgcaagatgcgacctcagtcgctcaggcattgcgttataccgctggcgttatctctgaatatcgcggcgcttccaacctgaatgacgaagtgactattcgcggtttcggctccgttcctcgtttcctcgatggtttgagctatagctccatcggcggcgtgcgtcgcgctggccaaatcgatccctggatgctggaacgggttgaagtcgtccgtggcccggcgtcggttttatatggtcaggttaacccaggcggcctgattaatatggtcagcaagcgccctaccgctgaaagtatccataaagtacaggctcgcgtcggaaataataaactggccgaagcggcatttgattttggtggcgcccttgatgacgaggggaaagtcctttatcgcctgaacggtatcggccgcactcaagatgatgcggtgcaatcatttaagcaggaacgttttgccattgctccggcaataactttcttaccaaatgaagataccagcttcaccttattaaccagctatcaaagagagcctgaagccggttcacgtaacttccttccggccagaggattactgaccgcgactcagtatggttatattccgcgtgattttaacgtcagcgatcccgcatttgatcaatcatggcgtgaacaaacttccgtcggttatgctttcgagcattatattaatgacacctttaaattccgtcagaatctgcgttatacccaaataaagcagcattataattatctggtatttttggatatgcagcctgacaaccgcaccatgaatcgccgtgcgcaaatcgaaagacagcaatatggcgaattctcgcttgataaccaattgcaggcagatttctggaccggtgaattaaaccacacggtattaactgggctggattacaaacgtacccgaattgatagccagttcctgatggatcgcggcagcaaatacgatttggactgggtatctccggtttatggtctgaatattcaggaaagcgcgctgggagtcagcgatgacgatctgaataaactggatcaggttggcgtttatctgcaagaccaaatcgaatatggcaactggaatctattgctgtccggtcgctatgactggtcgcaaatgaaagcattaagccgcgtcaccagcaaacagacgcagcaggatgataacgccttcaccggtcgcgcagcggtgctgtacgcctttgattccggtatttcaccttacgtcagctatagcacctccttcgagccgaatacgggtaaaggcgcaccgggtcacgaagcgctgaaacctattaccgctcgtcaggtggaagccggtatcaaatatcaaccgccgggttcgcaaaccttgctgactgcggctctatatgatttacgtcagaaaaacatcagccagcgcgatcaggtgctgaactacgacattcctatcggggaaactcaatctcaaggcttggaaaccgaattaaaaagcgcgctaagcgataatattgatgtcatcgcgtcttatacctacaccacggctaaagtgcgcgaaacaacccgcgttggcgagcaaggtaaaatgccacccactattccacaccacgctgcggcgctgtgggggatgtatacctttaacgaaggcgtgctgagtggtttatctaccggtgctggcgtacgttatatgggcaccagttggggtgatagaaagaacacattcaaagtaccggcgtctaccgtgtacgactggatgatgcgttacgaattaggtaatgcagttccgacgctgaaagggacctcactacaggttaacctgaataacatcaccgataaggagtacgtggcaacctgttcaaccgattccgcctgcttctatgctccgggtcgtactgctaccgcaaccgtcagttattcctggtaatcgctgcgtatacaccgcgcctgtctgctggcaggcgccgatttcctactgccttcctcttatcttccatacaaaccttaaagaaaggtaaatatttccccacgcgttcactctcccttcatcgccacgacaatataactttataaaatataataagttaacctaataataactttccctctcatgtcatttaacctttctaaaattagggttttatctttatactcgccccatcacccattgaggcaaaactatgtcagcgtccgtaggaataccccagttaatgcaccgcatacgcaccagtacccagcgtatgtgcgggctgctgttggtatttttctggctgatacttaatgctcaagttgcggtagctggccatcattgcgatttgatgctgtccgacaaaccggcggttattcagcatcaggaacatactcggcagacgatggatatgtcccacggtcaggcgcaaaatgcgctgtgtgacaaacactgcgtgccggattcgatgcagccagacggcagcgttatcgcgctagccgctttacttccacaaaccgaactgcggctcgcagcggttcaaacccatgaagtgatacaaaaaagcgattggtattcccctcccatcgccggacctccgacggagatcgttttctgtcgtttcagagaataactccagaccttgatatcccctgtatgccgtcattcagcggcaccttgcgtttatttattgtctggagttaatcatgaaaatccttattgctacccttttcctcgtgttacctaccgccgttttctcagccgatccgcattcccatcagcatatgtatcaaccggatgcatcgagtacatccgtagaaaccatttatcagtcccaaggtaaaattaagacctggagcgccgcaggggtattcatcagtcatcaggccattccagctcttaactggccgccgatgaccatgagctttagcttacccacagcagataatctgcaacctttaacggtcggaacagaagccgatttcagcttccgccagaccgcgcagggttacgaactggtttccatcgctccgcaccaatcttaagcagggttaacatgatcagattcctctctcatcgttctccggtgcggccagcccttgcctgctcgctcaccttgctgacgctgtgcctgccgttggcggctcaggccgtcgagatcacgctgaatcaggctatcagttcggctgaacgttattccgccgaactgtccgccaatcaacatcaggtgaatgcgttggaaaatatggccagttccgccactcaactgcccgatcccaaactcaaattcggaatagaaaatctgccggtcggcggcaataacggtcaccgctttactcgggaaggcatgaccatgcagcgtattggcatcatgcaagactatgtaagcggcgataaacgccagcgcaaagccgataccttcaacgcggaggcacgcaaaaccgcggcggccagcgaaactattcgcgctcgtttgcagaaagatgcggcccaatcgtggctggatttggcgctcgccgaacaagccgtcagagatgctcaaaaactggtgctggaaagtgaaaaacagattggcgtaaaacgggctggcgttatcggcggagccagccctgccagtagcgtagtggattcccggttgatgctggttgccatgcaggatcgcctaaccaacgccgagcgagacgtgcgtctggcgcaaacgcgtttgacccagctaaccggtttggaagtgaccaaagccagcggttcactgcccgctttcacccgcctgcctgctgatgttgcggttttgcaggcggcggtgctccagcatcccgaagtattacaggccagccgcgaagcggaagtggcaaaggctcgttcggctcagtctgccattgcggcaattcctgatattggcgtcgaggtttattacgccaaacgttctgagggctatgacgatatggccggggtgatggttagcgtggatttaccgctgtttcgctcccaaagacaggataaagactatgccgccgacgtttcccgcaccatggaagccaacgatcagctcactttactgacgcgagatcatcgggcgcagctcgacacgctattggcacaatatcaggccgcccagcaacgttggcagcgtcagagtcaggaagtgctgccgctgcaaaaaaagcggctagatctgatcattgcgcagtatcagggcaataaaagcgatctgtcctcggtgatggatgcccgtcgggcgctattggaaagcgagctaaacactcgcgatgccgctcgtgaactggccgccctgtgggttgctattcgctatttaatcccgcaggagacaacacgatgaaaaagcacttcactttgagtctggtcgccgtcgctatgctgggcggattgaccggttactggttgggaaaaccggcgcaacatagcgaaataacttcgcctgacaccgcagaatctggccgtaaagtcttatattggtacgatccgatgactcctggacaacgttttaatcagccaggtaaatctccgtttatggatatggagctagtgccccgttacgccgatcaacaggccgatgacggaggcgtgattatcagtgccagacagcagcaaaatctgggcatacgcacggaaaagtcccagatgcgtagcctgaatttgcgcttaaccgcttacggcacggtagctaccgatgagcgcagcgtttcagttataccggctcgtgccaacgggatcgtcgaacagctttgggtgcgagccaaccagcagcaggtcagcaaaaatcagccgttagcgtctctgtggataccggaatggaacgccgctcagcaggaatatctggcgatccgcaagttgggagataacccgctaacctccgccgctcgccagcgtttgcagctgcaatttatgcctgatgaaattattcgtcaggtagaaaaaagcggtcagccgcaaacccgctataccttacgcgctccctccgcaggttacgttaacaagctggatattcgcgctggggcgcaggttagcgccacgcaatctctatttgaactggccagtctggatccggtttgggtcgtcattgattacccacaggctcaggcgagccagttgcagctcggtagcgctattcaggcgacctctgccagttggccaggagaaattttccatgggaaagtcagtgaactgctgcctaacatggatttaactactcgcacactgaaagcccgtatcgtgctggataacccgcagcaaaaattaaaaccgggcatgtacctgaatctgcaagcaacctcgcgggaagcgctgccaccggtgttggcaatcccgcaggaagcgctgttactgactggcagtcgcagtcgggtgctggtcagtgaaggagacggtcactttaaacccgtcaacgtcaccgccggtcactctcaggacgggtgggtagaaattaaacagggactgagtctcggcgagcaagtggttacctccggtcagttcctgatcgactccgaagccagcttgcaaagcgtacttccgcaaatggaggagcctaaatccatcgatggtagcaatccaactagcgccgtcgcgccagatacctatagcgcttcaggccgcgtcaatgctattgacgggcaaactatcactttgagccacggagcgattcctgcgttgaaatgggggccaatgacgatggatttcactcttccagaaagcgattttcctgcgaatatccacgtcggtgctcaggtggattttcaattcacgttggacgataacggcgcgcatattcagcacattaacccatcaaaattggcagataagcagcaaattcatggaggccacctatgattgccgccgtgattcgttggtcattacgcaaccgcttattggtgctattgggtgccgtcatgatggccggctggggaatctggtcgctacagcaaacgccgctggatgccctgccggatctatctgatacccaagtgattattcgcgtcagttatccgggtaaagcgccgcaggtggtggaagatcaggtgacttacccgttgaccaccaccatgctatcggtgccgggcgcagaaaccgtacgtggtttttctatgttcggtgattcctacgtgtatgtgctgtttgccgaaggcaccgatccttactgggcgcgttctcgcgtgctggaatatctcagccaggtgcaatccagtctgcccgccgaagccaaggccgcgctggggccagatgccaccggcgttggctggatctatgaatatgcgttgatagataaaaccggtaaacacagtctggcggatttgcgagcgttacaggattggacactaaaatttgagctgaaaaccgttcccaacgtctccgaagtcgccagcgtaggcggtatggtgcgccaatatcaggtggtgctcgatcctgaacggatgcgcgcactgaatctttcccatcagcaaatcgccagcgccattcaggatagtaatcaagaaggcggcggttcggtattggaaattggctcggcggaatacatggtccgcacctccggctacctgaaaaagctggatgattttaacaacatcgtgattaccgcccgcgacggcattccaatcctgttatcggatgtcgccagcgtgcgaatgggccctgaaatacgccgcggcgtggccgaattaaacggtgaaggcgaagtggctggcggcattattgtgatgcgctacggcaaaaatgcgttggaaaccatcaacggcgtcaaagccaaactgcaacaaattcagcaaacgctgcccgcaggcgtggaaatcgtaccggtttacgatcgctctcagttaatcacccacgccatcgatagtctgtctttcaaactgctggaagagtttctggtggttgccgtgatttgctcgctatttctcttccatttccgttcggcgctggtggctattattaccctgccactgggaattctcggcgcgtttatcgtgatgcattatcaaggagttaacgccaacattatgtcactgggaggtatcgctatcgccattggcgctatggtggatgccgcgatcgtgatgatagagaacatgcacaaagtgctggaacaatggcgaaaagatcatccggggcaaaaacccgtcggaaaggattactggcacatttccgagcgggcggcgattgaagtcggcccggcgctattttgcagcttgctcattatcacgctgtcatttattccggtgttttcattacaggcgcaggaaggccgaatgttctcgccgctggcctttaccaaaacctacgccatggcggtttctgccggtttagccatcactttagtacccgtgctgatgggctattttattcgcggtaacattcccgatgagaatgccaacccaataaatcgctggctaatcgcattatatcagccggtgcttagcgcggtgctggctcgccctaaaactactctgacgctagccgctgtggctttggtcgccacgttgtacccgctcagccgtttaggcaacgaatttatgcctgcgctggatgaaggcgacctgttgtatatgccatcgactttaccgggtatttcagtgcaggaagccacgcggctgctacaacaaactgaccgtctgatcaaaactattcccgaggtcgatacggtatttggcaaggcgggacgggctgaaaccgcgaccgatcctgcgccgttaaccatgatcgaaaccaccattcgttttaagcccaaagatcaatggcgggcaggtatgacgatggacaaattgatcgaagaattggacgccacggtaaaagtaccggggatcgcgaatttgtgggtgccaccgatccgcaatcggctggatatgctttccaccggcattaaaagtcccgttgggatcaaggtaaacggtaagaatattcagcaaatcgaacaggttgccttacagatcgagcaagttgtgcggcaagtgcctggtgtcacttcagcactttctgaacgtttagctggaggccgctacgtagatatcgatatcgatcgccagagagcggcgcgctatggagtttcggtcaaagagctgcaatctctggttgccagcgtgataggcggacagaatatcggtgaaaccattgaagggcgggaacgtttcccgatcaatcttcgttatccgcgtgagctgcgcgattcgctgcaaaaactgcgcgacctgccggtattgaccgctgcgggcgggcaaattgctctgtcggaactggcggatattcgtattagcgaaggcccacctatgctgaaaagtgagaacgcccgcctctccgattggatctatgtggatctacgtggacgagaccttaaatctgcggtgttggatatgcaaaaagcggtggatcagcaggttaaactaccggaaggactctctctcagttggtcaggtcaatttgaatatctggaacgagccaccgccaagctgcaaattgttctccccgtcacgctgatgatcatttttgttttgctgtttgtgaccttcggcaaagtcagggatgccgcactgatcatggcgacactacctttcgctctgatcggcggtatttggctgctgtatggattgggctacaacttctcggttgccgctgcggtgggctttattgctctggctggcgtggccgctgaatttggcgtcattatggtgctgtatctcaatcaggcggtgaaaaagcatcaattaccggggcaaccgctgaccgcggaacaaatgtgcgccgccatccacgaaggggcggtcctgcgagtaaggccaaaagccatgaccgtcgccaccattatggccggattactgccgatcatgtggggaggcggtgccggatccgaggtgatgcagcgcattgccgctccgatgatcggcggcatgatcagcgcgccgttattatcgatgttagtcattccggcggtgtatttactgatgcatcgacgtaaagggtaatctttttcgcgcgggataaaggggtatcccgcgcgcgaaagatcgctgttttaacgggtaaagccgacgcggcaaagatggctgtctccattcagcgtgatagacttaacgccagaagaaatccataacaatctgtattcacttatctctcccagaggattcatcatgagccgtgagattaacaaagacacccgtttgtgcatgtcactggccggacggccgggtaacttcggcacccgattccataatttcctgtatcaagaactggacctcaactacatctacaaagcgtttactaccaccgatattcaggcggcggtcggcggtatcagagccctaggcattcgcggctgcgcaatttccatgccgttcaaagaagcctgtattcccttcctggatgaattagacgcttccgccactgctattgagtctgtgaatactatcgtgaatgacgatggcttcctgcgggcgtacaacaccgactatatcgctatcgccaagctattgaaccaatatcaggtgccaactgaaagcaccttcatgctgcgaggcaacggcggaatggccaaagcggtcgttgccgcgctacgcgatgccggtttcaaacacggtcatatcattgcccgtaatgagaccgccggaaaagcgctagcagaaaactacggctatcaatggcaggccgacgttggcgatttgaccgccgatatggtaatcaacgtgacgcctattggtatggccggaggcgcagaagccgagacgctagcctttgaaccggcaaccattgaacaggctaagattgtgtttgacgtggtggctctgccagcagaaacaccattgattcgctacgctcgagagcagggcaagcaggtgattaccggcgcagaagtgattgcgattcaggccgttgagcagtttgttctctacaccggagtgcgtccaaccgatgaacaggtagaacgtgccgctgctcacgcacgcggttaatatggatttctgaccagaacgtttacctgatttcagacataaaaaagcgcagtatcaaaccgcgctttttatttgcaacctgtcgctttcgcctactgggcgttagccgcttccattccgaccaatcccactttgagataaccggctttccgcagcgaatccatcacgctcatcaatgtttcgtaatccacactcttatccgcctggaagaagattgtggtttccttattggactgcgttcgcttatccagcgccacggccagcgtttcgcggtcaacctgctgctcgcccacgaacagttggttatcggctttcaccgacaggaacaccggtttctcaggacgcggttgcggcgcggcggaggacgcaggcagatccactttgatgtctacggtagccaaaggcgctgccaccataaagataatcaatagcaccagcatgacatcaatgaaaggcgttacgttgatatcgtgtaattcgccgctttcatcaggattttcattcatgtgcattgccataaatcaccccgcacgcagttgttgagcatggcttgatgatttattttctgcggtgctgctagccagatccagatcgcggctcaataacagcaaggcttgcgcggcaacatcacccacgtgagcgcggtaagttccgatcaggcgagcaaagatgttatagataactaccgcaggaatcgccgccaccagacctaatgccgttgccagcaaggcttcggcaatacctggagccaccaccgccaaattggtggtttgcgaatgagcgatgccaataaagctgttcatgatgccccaaacggtgccgaacaaaccgacgaacggagagatagccccgatagtcgccaggaagccggttcctttgcccatctgacggctcacggcagccacacgacgctccaggcggaaagaggcgcgctctttgataccgccattatcagtggattctgccgatagctgacgctcgttttccgcttcgcgcagcaacatgccactgatgctttccggcgcaaaatcttcggcctgcgccaaagcgtcgctcagattagtcgccgagccgagcacaatgtgctcatgacgcaggcgacgacgggcgcggtacaattccatacctttagagaataaaatagtccaggtaacaaccgacgccagcaccagaccaatcatcacggctttcaccactacgtctgcatgctggtacataccccaaacggacaaatccatcgccagaccttgtggagcagcaggcgccgccggagtcacagattgtagcgcaggagcaggagcggcatccggcgttgcgacagaggttaactccggctgcggcagcggagttgaaaccgcggcggtgtgctgcgttgacgcgggcgccacgccagcggcaactgcactgctattacctggggctgctaatgccgggccagataaacctgcgattaacaagagcgccataacgccgcgccctaacttcactccccgaccctggtttgcggcgaatgatttatgttccataactttgccagctgttttcacgctgcgcctccacccaatatgcatatcaatttaaggacgaaatcagtggcggatcatatcaaacaaatgacggattgatagtaattatcattattatttgagccaatttttctatctaaaagataattaaggcaaactcgccgcccagaccgctgtttttcatcgccagcctgcttcaaacgctgataacacttgggctaaacaagtaacaaccatagggttttattcacataaaactcactcgccgtcgattttctttaccaataaaccattactttctgtgcgttttgcagcatttttttgtgcgtaaaccgccttaaacagcggctccccctctttaaacgccatccggctaaaagcgcactacatcaaatgttcatcatgctaatttaaataaataaccaatcagataatggctggcaatcaatccagaccgacactaaccaagcaaggtgagcgcccgtatgtcttcaaaaaaattagaaaccacgttgatcagcgcagggcgcagtaaaaaattcaccctgggatcggttaatcctgtgattcaacgcgcatcgtcgttggtttttgacagtgtaaaagccaaaaagcacgccacaattaaccgtggtaaaggcgaactattttacggtcgccgcggcacattgactcacttcgccttgcaggaagccatgacagaactggaaggtggcgcgggctgtgtgttatacccttgcggcgcagcggcgatcagcaatgccattctggccttcgtatccgcgggcgatcatgtattgatgaccggatcggcctacgaaccagcgcagagtttttgcgataaaatcctgtcgcggatgcaggtcagtaccagctatttcgatccactgatcggcagcgccgtgggtaagttggttcagcctaataccaaagtggtgtttttagagtcgcccggctctatcactatggaaatacaggatattcccgcgatggtgcgcgccattcgcgccgtttcaccaaaagtgattatcatgatggataacacctgggcggcgggcgtgttattcaaacctcttgattttgatatcgatatttccattcagtccggcaccaaatatctgatcggccattctgacgccatgctgggcatcgccgtagccaacgcgcgctgctgggaacaactgcgggaagactcatatctcatggggcaaatggtggatgccgacagtgcctatctggctagccgcggcctgcggacgttaagtgtgcgcctgaaacagcacgaagctaacggtatagacgttgccaactggctggcgcagcgccctgaagtggctcacgtttatcatccggcgctgccagactgtcaaggccatgaattttataaacgagatttttctggctgcaacgggctgttctcttttgaactcaagcaccgcctgaaccagcaacaatttgaaaactatctggacaactttcaccacttcagtatggcattctcttggggcggctttgagtcactgattctggcttaccagccggaagatattaaagcgatacgtaaatatgaagctatcgcgcatcagggcactttagttcgtgttcatattggtttggagaatactcaagatttaattgaggatctggccgccggcttcgctcgtatcgcctcagcgcaataaggcctctaccagtgggaactgcgctaatttgtgcggttttcaccgaagttagtctctaaaccatcaacagaatgaatataccccgctaatttttggttaatgaggataagatcaatgtggcctgagtctaataccgatacactgtaaggattcacggattatcttccccaccaataggcaaacaggaaaagaaatggatgtgttacgcgaaatccttcatgccttatggcaacaggattttagtaaacttgccgaccccaatgtcatttgggttatctacggcatactttttaccactttatttttagaaaacggcctgctgcccgcttccttcctccccggagatagcctactgctgcttgccggtgccttaattgccaaaggcgttatggcttttattccgacgctgattattcttaccatcgcggccagtttgggctgctggcttagctatgttcaaggtcgatggctcggagataccaaggtcgtcaaaagctggctactacaattaccaatacattatcgccagcgggcgcaccaactgtttgtacgccacggtctggcagccctgctcattggccgttttctggctttcgttcgcaccttactgcctacactagcgggtatttctggcctgaatagtacccgtttccaactatttaactggctgagcggattgctctgggtcggtgcagtggtgggtttgggcttcgccctgagccaaatcccgttagtgaaacactacgaaaatcaggttatgaccgcactgatgattctgccggtagccttgctgctgattgggttggtcggctcactgattgtggtgtggtgtaagcgtaaaagcgccaccgaataacgcgttcagacacgctggctatccgcgattcatcgagccagcgtgcccttggttttactagtgactgcgcagttttgcccgctcgtcgctaggcgtatgaccaaagtaacgtttaaattctcggctaaactgcgacgcactctcataccccacccgaatagccgccgtactggccttcaatccatcgtgaatcatcaatattctggctcggtgtaaacgataggttttcaaatattgcagtggagaagtattggttaccgctttgaaattatggtggaaagccgaaatgctcatattcacttctgccgccaactgctccacattaagattttctgcaaattgattctcaatgcgccgtagcgccttagctatctgattaaaatgactgtgacgattcaccaactcctgcaacggagcaccacaagggccggatagcacataaaacagaatctcgcgcacgatttgcggccctaacactctggcatccagcggtttggccataacgtccaacaggcgctcggtggcacacagcatctcttccgtaagcaatgcagcgttgacgccgttggtattacctcggggtttatccagctcatcgtcaccaatatccaccagcagatcctgtagcattgggtgatcaacctgaatggataatccggcaagcggttcttgcgggctggcaaatgtttcacattcaaacggcagcgtcaccgtcagtaacagatagtttttcggatcatactgaaagattttactccccagatagcctacttttttaccttgaaagatgatcacaatactgggggtatacatcaccggcgtacgtggttgatgggcattggaaaacagcagcttaaccttgggaaccgcggacgtcgtcaacccgtttccctgtgccagttgcgcgactttttgcgccagttcccgctgaatatcgtcaatgctcaccataccaacctcatatttcataaaaaatatatcgacacgaattttgctttatttatcacatttcctacagtggtttgtagaaataggcaagaagctggcagaaatgagcattgagctatatgactaagttacccacaatagccctcagagaaatttgcccaataggttttttccgtcgcaaggacgcagcctaagggtgggaagcccactggctaatttactggccattcaaggttgatactgactattagcctattaatcaactacaggttggattataaaatcatgcaaaactttactcttcataccccgactaaagtcctgttcggtaaaggccagattgctgaattggcgaaccaaattcctgccgatgcccgcgtattgattacctacggcggcggtagcgtgaaaagcaccggcgtgatggatcaagtctatcaagcattgaaaaaccatcaattcgaagagtttggtggtatcgagcctaacccaacttatgaaaccttgatgaaagccgttgaactgattcgcgccggtgatttcgacttcctgctggcggtcggcggcggttccgttttggacggcaccaagttcatcgctgcggccgtggcttaccctgaagatccgtggcagattctagaaactgccggtagcaacatcaccgaagctattcctatgggttctgtactgaccctgccagctactggctctgaagccaataatggcgcggtagtcagccgccgtagcaccggtgacaaacgtcatttcttctcaccgcacgttcagccgctttttgccattctggacccagtggtgacctatacgttgcctaagcgtcaggtcgcgaatggcgtggtagatgctttcgtacacaccattgagcaatatctgacttacccggtaaatgccaaggtacaagaccgttttgcagaaggtttactgctaaccctgattgaagaaggcccgaaagcgcttgaaaatccgaaagattacgacgttcgcgctaatatcatgtggagtgccactatggcgctgaacggtctgatcggtgctggcgtaccgcaggattgggcgactcatatgctgggccacgagctgacagctctgcatgggttagaccacgcacagactctggcagtggtgttgccatctctgctggaagcgaaaaaagagcagaaacgcgccaaattgctgcaatacgcagaacgcgtttggaatttgcatgaagggaccgaagaacagcgtattgatggcgcgattgccgcaacccgtcatttcttcgaggcaatgggtgtaccaacccgtttgtctgaatacggtctggatggcagcactattccaagcctgatcaaaaagttggacgaacacggctaccgcagcctgggggaacacggcgatattacgctggcagatagccaacgtatctacgaagccgcaatctgatttaatcattatcgatactataaagggtaaggaaacgtccttgcccttctcctttcaaatttacgatggccatagcctcgattttttcttccagcatcgatacttactgctaggcttaaataccatatccgcggttttcatttagctgtagttcctgcccaagggatagcaacagccccctttctggtactgcaacacctttcgccctattgcatctcgtttatccatgggagagtcatatgtcgaaccaatcagttacaccctcgactgaatctgataatcacatccaggcttgggccgctcctgctgcgggccagccgttagaatccttcgtatttgatgccgggccactggctgatgatgatattgaggtcagcattgattattgcggggtttgccactcagatttatccatgatcaacaatgactggggcatcaccgcctacccctttgtccccggccatgaagtggtgggaaaaatctctcgtattggccaacatgccaaaaacaaaggattaaaaatcggtcaagtggtgggcgttggctggaatcgcggcagttgtatgcattgccatccctgtgtttccggcgatcagcatttgtgccatgaagttcagcccacgattattggccgccacggcggttttgccgatcggattcgcagtcattgggcatgggcaattccgctgccggaaggtgtggatattaccagcgcggggccgctattttgcggtggaatcaccgtcttcaatcctctgctgcaatacgatgttcgccccacacagcgagtgggcgtggtcggtatcggcgggctaggccatatggcgattcgctttatgaaagcctggggctgcgaagtgaccgcttttacctcgtctaataccaaacgtgacgaagcgctttctctcggcgctcatcgcgtggttgccagcaatgacagcaaagcgctggcaaaaattgcgaaccagctcgattttatcttagtgactgcaaatgcctccttggattgggatgcctatgtcagtacgctggcacctaaaggtcggttgcattttgtcggggcgatcccggagccggttccagtgcatatttttgcttttatcgggaaacaggctgagctatcggcatcaccgaccggcgcaccggctcgcttggcagaaatgctggcgttctgtgcacgtcacgaaattaaacctcaggttgagcattttcccctgagcaagataaacgacgccattgagcatttacacgcgggaaaagcacgttatcgcgtcgtgttggatatgcacgcttaatgcataaaatgattagcctgataattaataaataatttcgactacgataaataagagatcgattactgagtgtgcggctggctgcttcggcaaaactgcccgcaaccttgaggagaaattcatgacaaatcaaccgattattaaactgcatgatggcagcataatgccccagcttgggctaggcgtatggaaagctagccacgaggacgttcaggctgcggtcaccaaagcgctggaaattggctatcgttcagttgatacagcggcaatttacaaaaatgaagaaggcgtaggtttagcgttgaaatccgccgcgattcctcgcgaaaagctgttcatcaccaccaaactctggaatgaagatcaggctcatccacaacaggcgttagaaaccagcctggaaaaactccagttggattatgtggatctgtatttaattcactggccagatccaaaacagaatcgctttgtcgcagcttggcgggaactgattaagctcagagaacaggggctaactcgcagtattggcgtttgtaacttccatattccacacctgcaacggctgctggatgaaaccggcgtcgctccggtgattaaccagattgaactgcatcctttgctgcaacagcgtcagcttcacgcctggaatgccactcatcacattgccaccgagtcctggagcccgctggcacagggcggagaaggcgtatttgaacaaccgctgattcatcgactggcggagaaatacagcaaaactccggcgcaaattgtcattcgctggcatctggatagcgggttaatcgtcattcctaaatccgtcacgccgtctcgtatcagagaaaactttgaagtttttgatttcaaactggaaaaagacgaactcagcgagatcgccaaattggacattggcaatcgtctggggccagatcccgatagtttttaaataatggcagccaaataccgcgacaaaattacgcgatttttggtcaatcgacgaacggtaaactggcatcttgaatcggctttttaatcggctttttaatttagctttaaaagcacgcgtgaaccttcgagtcagggatgtcactcatcaatccgccagggatggcggattgatgcatcgcatgtaaaggttctggcgcaggttaacgaactttctgcttaacccggcccgcgtttgtcgactttcccccaggacgagagcctgttgaggatgatttgccctggatattggctggcgcagttttacctgaacctgatgacgttttacctgatgatccttgacccgatggcgggttgcctgatggttctttacccgatgctgatggcactttacccgatgtcattttacctgacgtcgctttgcgagacgtaacttcgcccgatattgctttgcctgagtgggcatgacccggcgtaactttaggtgaaccactcggctgacgctggcgtgcgatagcggtgtgtttagtcagcgctggcgtatggtgacgcaaagatcgtcgagcttcccgctgttcttctatcgtcggcgcaggcaccagacactcccgacgcccaccgatcaaatgtgccatgcccatatcttccaaagcggtacgaatcagcggccagttggcaggatcgtggtaacgcagcagcgccttatgcaagcgacgctggcgatctccttttggcaccaccacgtcttcacttttgtaatcgaccttagacaacgggtttttaccgctgtaatacatggtggtcgagttggccaatggcgacggatagaagttctgtacctgatccagacggaatcggtttttcttcagccatagcgccaaattaaccatatcctcatcccgagtgccggggtgagccgagataaagtaaggaatcaaatactgctctttacccgcctgtttggaataggtatcaaacagttctttaaaacgctggtagctgcccatgcccggtttcagcatttttgacagcggcccttcttccgtatgctctggcgcgatcttcagatatccccccacatgatgagaagccagctctttgatataacgcggatcttctaccgccaaatcgtaacgcactccggaagcaatcaggatcttcttcaccccttttagatcgcgcgcccgacggtacagcgaaatagtgggctgatgattggtatccatatgggtacaaatctcaggatagacacaggaagcgcggcggcaagtttgttccgcacgcggagactggcagcgcagcatatacatattggccgttgggccaccaagatcggagataataccggtaaaccctgggactttatcgcgaatttcttcgatttcgcgaattatagaatcttccgaacgactttgaataattcggccttcgtgctcggtaatcgagcagaaggaacaaccgccgtagcagccacgcataatattgatcgaaaaacggatcatgtcataagccggtatttttgcgtcaccgtaagacggatgaggaacccgttgataaggtagagcaaatacgctgtccatttcctcggtgctcaacggaatcgctggcggattaatccagatatagcgatctccgtgtttttgcatcaacgctcgtgcgcagcctgggttggtttcatggtgcagaatccgcgaggtatgtgcatataacactttgtctgctttaactttttcataagaaggcagcaaaacataggttttttcccacggtttaggcttggcagctcgcaccgtcaccggtttagcttcctcggcatctgctttcccctccggcgcgcaggctaagtcatcaccgtaaggattcggaatcggctcaatacgccccggtttatccaaacggctagaatccacgccgctccagccaggcaaaggcgttttacgaatcactacggtattacgcacatcctgaatatcagcaattttctcgccagccgccagccggtgcgccacttcaaccaatggccgttcgccgttgccgtacaccagcatgtctgctttagcatcaataatcaccgaacgccgcaccgtatctgaccagtaatcataatgagcgattcggcgcaaactggcctcgattccgcctaatatcactggcacatgcttataggcttccttacagcgctggctgtaaaccaaagtggcgcgatccggccgttttccactttcattattcggcgtataggcatcatcgtgacgcaatttacgatcggcagtataacggttgatcatcgaatccatattgcccgcagtgacgccaaagaacagatttggctcacccaaccgcataaagtcttctttattggtccagtccggttgagcaataattcccacgcgaaatccctgcgcttcaagcattctgcccacaatcgccataccaaagctcggatggtcaacgtaggcatcgccggtcaccacgataatgtcgcagctgtcccagcccagcacgtccatctcctcccgcgacatgggtaaaaaaggcgcggtgccatagcactcggcccaataaggcgtgtaggaaaatagatcgcgttctggctgaatcaggctggtactcatggcaatactctttaatcaggagatggagaggaggatgcgggtcaggaaatcatcacagggcggcgattatacgcatttatccatgtaaagaggaaggttatcggtggtttctttgatcccccaccgactcgtggagatcgcccaagaaattatcgaatagacaaacaaatagttgcgggcaatgacgtagaccaggcggcgattaaccgccctgtcttgaagaagaaaggattaaatcggagcaggctgtgtcaccaattgaccggtagagccgcgatcggccatttccagcgtctggctgtagaacaggaatgggaaatgctcggaagagacctgattgaaatacaccagcagctctacatcgccatcgacccaaaccgtatctttccaaccacggtcttccgccattgccggagcgccgttcacatttttcactaggaaagatacgccctgaatatggaaagcctgcggcatatcggcgtgcagcgtccagcgttcccaggttccctgctgcgcctgtgcgtcaacccgattcatatcccaaatcgcgccgttaatgcccggtaagttatcgcccaaacgaaattcacgagagcgtacaacgttgccgtcaagaatttggtcggccaatagtcgcattggcagattatcagttaccagcggcagtaaacccgtcggctttaaggtcaaaaccagcgtggagatcaagatactggagggttcaaacagcccgcgcagacgatccataatacccgcagactcaccggcagtaatggaaacctcgctgccctgcgacatatcaatcaacacttcgcgtcgctcacccggtgccagcgatagctgttgtacagcaacgggcgcgggcaggaaaccctgatcgctagccacaacgtggaaaggtcggccatcgctgatttgcagagtatagcggcgggagttcgaggcgttcagcaaacgcaaacgcacccatccacgagaaacttcgacaaacggactttgcaccccgttaaccagcaaagtatcaccgataaagccgcccttggccggcgggttatattccggaacgccaaagctgtccagtcgtttgtcctgaataataatcgggaaatcatcaacgccgtagtggctaggcagcggcagtgctttactcacctcatcttccaccaaccacattcccgccagcccgttatagacatggggagccatacgattaggcgtattggcgtgataccaacaggtggcagcgctttgacggatcggcagcactggagaccaatctacgcccggtgacatcatgcgcggcgctccgcccattaaagtgccgggaacctgtaaaccgctgatagtcatagaaaccggctcagacagtcggttgctgtaaatcaacttgacatcatcgccgctgtacactctgaccgttggccccagataggagccattgatgccccacacttccgcctttttacggccagacatgaatgcccagtgcgcgcgctgtaacgttaaaaacagcggttggccacggcgggattccagcaatgggggaaccggtaagggaggttgctgcgtaccgctagcctgtgccctcaatggcagtgaacctgcgcatagcgctaagcccgaagcctgaatgaactggcgacgactaagtgacatatcttctccgtgaaaagcactaacaaaccgtatgcaaaagttttgcccgccgacgccgcacgggtatcagcgggcaaaacactaacgatcaaagtcgtttaaaataaaggcatttttattttagcgtatccagtaacatactggagtcgcgttattttttttctgctgcgtacttagcaacttcagcatcaagctgctcaattttggtcgccatcagattacggcaatgctcggcgagttcgcgcactcgctctttgctgtagccgctggtatcaataggtggcagcatttctactatcaccaatccattattccaacggttcaaattaatattaccattggtattggaaacacaaatcggcacgataggtacgccagcggcgatagcagcatggaaagcgccagttttaaacggcaacagaccacgaccgcggctacgggttccttccgggaacatccagatagaaatattacgtttcttaacttgctcaaccacttgcgcaatagttccgtgggctttagcgcgattctcgcggtcaatcagcaggttaccggtcagccaatacagtggcccaaacagtggaatccacagcaggctttttttaccaacggttaccgtaccaggctgaaccacattcgacatagtaaccatatcgtaattattctggtggttagcgatatagatacagttgccatactctgcagcttccgctggaatacgttgttcaacggtgataccgaatagtcgggacattcggccaaacaaatgtccgaaggtcgcaacgtggcggggatttcgtggactgaaaagacagtaaatcgaaccaaacacacacaccaataagcaatacaaaaccgccagtactgagcgcaaaattaataacataacaacctcttgaaaacctaatcgacgctagtatagcggctgcgataaaaaacaccgcgtagattcaccgccataataaattgccattacagaaggttcaaataatctgggggaaaaggccaacggccatggctgatcgatcaaagcggtcaaccgtttaaatcgatgccgatgcggattgccagcctgaatacgactggcaatccgctcagggacaatagctactggttattttcaggctgttcagggcgcgcaggcgcgtccacttcaacccggtctatcttctgcaatccacgaggcaacggcgagcctttgcgtccacgttccgcacggaatttctgtaaatcttctggacgcagcgtcagcttgcgtttgccgaagtacagcgtcaccgaagtctgcggaggcaagacaaacagccaggctagcccgtcttcccctgccgccgcctgcgccgccggaatagagacgatcttattccctttccctttcgacaactccggcaaatcggccaccgggaacatcagcatacgtccagccatggtgatggaaagcaacatatcatccgggccatgaatttccagcggcggcaacgctttcgcgttttccggtagagtaatcatggctttacccgcgcggttcttagccaccagatcgttgaaagtacagacaaaaccgtaaccggcgttagaagccatcaacagtttttgatcgtccggagccatcaacacctgctcaatggtcgcccccggaggcggcgttagcttaccggttagcggctcaccttgcccacgagcagacggtagcgtcagcggatccagcgcatagctgcgtccggtggagtcaataaacaccaccggctgattactcttgccgcgagcagcggagcggaagctatctcccgctttgtaacttaaaccgcttggatcgatatcatggcctttggcgcttcgcacccagcccatctcagacagcacaatagttaccggctcggaaggcacaatatcgtgctcgctcatcgccttggcttcactacgttcggtcagcggcgaacggcgatcatcaccataagcggccgcgtctgcctgaatttcttttttgatcagcgtattcagcttgcgttcagaagccagcagcgcctgcaattgatcgcgctctttcgccagttcatcctgctcaccgcgaatcttcacctcttccagcttggccagatgacgaagtttcagctccagaatagcttcggcctgcgtttcggaaatcccgaaatgctgcattagcaatggcttaggctcatcttcggtacgaataatatgaatcacttcgtcgatattcaggaaggcgactaataaaccctctaaaatatgcagacgcttcaataccttatccagacgatagttcaaacgcttacgcacggtgtcgcggcggaattccagccattcggtcagaatttccagcaagcctttcaccgacggacgatgatctagaccgatcatattcatattgatacggtagctgcgttccagatcggttgtcgcgaagaggtggttcattacctgttcgagatcgacgcgattggttcgtggcacgatcaccaggcgagtcggattttcatgatccgattcatcgcgcaaatcctctaccatcggcagctttttcgctcgcatttggttggcgatttgttccagaaccttggcaccggaaacctgatgaggcaacgctgtaatcaccgcgctgccgtcttcttttttccataccgcgcgcattcgcacagagccacggccattctgataaatcttacggatttcgtctcttggtgtaatgatttccgcttcggttgggaaatcagggccttgtacgaactctagcaattcttccagcgaggtatggggcttatcaatcaacgccactaccgcctgagcaatctcccgcacgttatgcggcggaatatccgtcgccataccaacggcaatgccggtagtaccgttcagcagtatgtttggcaggcgcgcaggcagcattttcggctcctgcatggtgccgtcaaagtttggcacccaatccaccgtcccctgccccaattcacccagtagcacttcggcatatttggataaacgagattcggtataacgcatcgctgcgaacgatttaggatcgtccggtgccccccagttaccctgcccgtccaccagcggataacggtaagagaacggctgcgccatcaacaccatagcttcatagcaggcgctatcgccgtgaggatggtatttacccagcacatcacccacggtacgcgctgatttcttaaatttggcactgttgctcagacccagttcggacatggcatacacaatgcggcgttgtaccggctttaaaccatcgccgataaacggcaacgcccgatccatgatgacgtacatggaatagttcaaataggcgttttcagtaaatgtgtgcagcggtaagcgctctgcaccgtcatgagtcaaatcactcattacttaattatcctcagactcgggcgagaagatcgtggcttacagccaatcatcaccggaagttcattatagatttctgctcgcgatagtaactcatctgcggggtaactgtcacaaatccaaagcaatctacgcgggcaaatctgcctattttcgccgcaggccacgaattttgctgtctggcgcttttgtcgctaaaagcgacagttaggatgaatatccccgctttgttgcttcgcagtcaaaactgttctgcctaaaagcctatttttctatgcgaatgcaatcattagcatacgctgcaatcgagataggccagaaataatagtcacgctgtatacagcatgttgttttcactggttgtcttcacgctacccggagtatgccatgagtaacatactgattattaatgcaaagaaagaatttgcccactcaaaaggggcattgaacgatacgctgaccaaggttgcgaccgagtgtctgcaagaaatcggtcatcaggttaaggtcacggttgttgatcaaggctatgatattgaatctgaaattcagaatttcctctgggccgatacggttatctatcagatgccgggttggtggatggggccgccttggattctgaaaaagtatatcgacgaaatctttaccgaaggtcatggccgtttgtatcaaagcgatggtcgtagccgttcggaaaacagcaagaaatacggatctggcggcctgcttcaaggtaaaacttacatgctttccgtgacctggaatgcaccggcagaagcctttaccgatccaaatcagttcttccacggcgttggcgtggacggcgtttacctgcccgttcataaagcgaatcaattccttggcatggaacctctgccaacctttatgtgcaacgacgtgattaaacagccggacatcgcaggtgatattgcacgttatcgccagcatttatcaacgctgttcgcctaaaatccagcccgatttggagtggttatgattagcgttttcgcagaaattcaggttaaaccgggccgccgtcaggcggtactggattccttcgcccaactgctgccggacgtactggcagagcaaggctgcggcgggtatgtccccatggttgatgtgccaactcagttagcctggcagcgccaagcgcctgatttcatttttatgtgggaacagtgggccagcgtgcaacatctggaacaacatctcgccatgccgcatatgaagcggcatcaggaacgagtgaaagacgatgtattggacgtagttatcaatattattgatcacgccctgccagccaaagcctgatgtatttatatcgatagcttttatgtcagtcgcttgaaagtcaataacacccaatagattacatattgatagattgcatagtggagcaataagacaaacgaacgaatctttaggcacttattccactctgtgactgaagtcagtaaaagcgatcaacatcccagcagaatgaaagcgaaaaagtctaatgtgtctaccggctatccgccctcatcgggtagccggatttcccaatctacgactatttttctgctttgagccaatggctaccctgcaaacgaatctgctcgctcacgtaatccagaaagcaggtgatccgcgcagccaactgcgtattacgataataaaccgcattgatcggttgccaggcttccagcgtttgctccgccagcacctgcaccaagcgtccttccaactgatcttcccgcgtcataaaatcggataactcgacgattccttgtccattcagtgccaaatggcgcaaagtttccccactggatgccgccaagcaaggcgtaatcgatgagcgaccgccgggcaaataaggtaacgcccactgattcagaaattccggttgagtaaatcctaataagctgtgctcagccagtgcttctatcgtttctggcgcaccgtggcgctgaatatattccgggctagccagaatccgcagacggctggaacccaataagcgggcatgaatcgtcgagtcgcgcagagcgccaatacgaatggcaacatccgtccgctgctccagcagatcgatattcagatcgtcggtattcaactccagatcgatctgcggatataactcgcgaaaaccgccaatcatcggcacgatcacatgctgcataaaaggcaccgcggcgttgactcgcagtctcccggctggtttcagccgtcgcagtgcgatttgttcttcggcatcatccaccgcgccaataatctgccgagcgtgagccaaaaacagctctccttcctcggttaactccagccgacgcgtggtacgccgcagcaaggtggtttccagtttttgctccagacggctcagcgcccggctaatacccgatgtggtttgattgcgttgttccgccgccgccgtgatcgaaccgctgtccaccaccgagataaaagcttgaagttcttctaaggtgattttcattattgacatccaggcaaagatttaagctatttaaccgcaaaaacttgtagaaatgaagctgcggttagcggtcataaacgaccacgcccggatctgcatgaatgcagccgggcgcggtttaacgcaaagatccgcaaaaaaagaattacacttcgatctcggcggtatctcccttctcttgtagccaattacggcgatcttcggaacgcttcttcgccagcagcatatccatcaccgccatcgtcttatcgatatcggtatcgtcaacggtcagctgcaccaaacggcgagtattaggatcgagcgtcgtttcacgcagctgtagcgggttcatttcacccaatcctttaaagcgctgaacgttaggtttaccacgtttacgcttcaactgctccaatacgccagttttttcttcttcatcaagcgcatagaacacttctttacccaaatcgatacggtacagcggcggcatggccacatagacatggccaccgcgcaccagcgagctgaagtggcgtacaaacagcgcgcacagcaaagtggcgatatgtagaccatcagagtccgcatccgccagaatgcagatcttgccgtaacgtagttggctcagatcttcgctatcaggatcgataccgatcgcgactgaaatatcatgcacttcctgtgaagccagtacctcatccgaggacacttcccaagtattcaggatcttacctttgagcggcatgatggcctgatattcacgatctcgcgcctgtttcgccgatccgcctgcggaatcaccttctacgagaaacagttcggtcatgctgagatcctgcgaggtacagtctgccagtttgccgggtaaagccgggccgctggtcagctttttacgtaccacttttttcgccgcgcgcatccggcgctgcgcgctggaaatagccagctcggccagttgctcagccgcctgaacgttctggtttagccacaggctgaaggcatctttcaccacgccagatacataggccgcgcactgacgagaggacaggcgctctttggtctgaccggcaaactgcggatcctgcattttgacggaaagcacgtaggcgcagcgttcccagatatcgtcggcggacagcttcacgccgcgcggcaaaatattgcggtattcgcagaactcacgcatggcgtccagcaagccttggcgcaggccattgacgtgagtaccgccttgcatggtaggaatcaggttaacgtagctttctgtcagcagatcgccaccttccggtagccataacagcgcccagtcaatagcttcggtatccccagcggaagaaccgacaaacggcacttccggcaaagtaatcaggccgttgaccgcttccatcagataatcggtcaggccatcggcataacaccagcgttgttcggtgttattcaccatgtctttaaagacgatttccacgcccggacacagtaccgcttttgctttcagcaaatgtgacaaacgggaaacggagaaacgcgggctatcgaaaaacgattcatcaggccagaaatgcacgctggtgccggtgtttcgcttaccgcaagtaccaatcacctgcaaatcctgcactttatccccgttttcaaacgccatgctgtaaatctggccgtcccggcgaaccgtcacttccactcgacgagacaaggcgttaaccactgaaatccccacgccgtgcaaaccgccggagaattggtagctcttattagagaatttccccccggcgtgcagacgacagagaatcagctcaatggccggtacgccttcttccgggtgaatatccactggcatcccgcggccatcatcaatcacttccagagactgatcggcgtgcagaatcacatcaatacggcgagcgtgtccggctagcgcttcatcaacactgttatctatcacctcttggccgaggtggtttgggcgcgtagtgtcggtatacatacctggacgacgacgtactggttctagaccgctgagtacttcaatggcatcagcgttatagctggattgagtcatggtttgattaatgttcggctaagggttggagggctagcggtgacagccgggtgagtgattacactcaccgcatctggcggcgataacgtcacgctgtatcaggcagtcgttagccctaaaaaattcacaatcggtgagaaatagtgttcaaagcctacaaaggcatgatttccacctgattctaccgtttgtcgacaagaggtgtaataagcaaccgcctgtcgataatcgaggatttcgtccccggtttgttgcaatagccagagtaaatcaggcgattccaacggatctatttgcatgactttcaggtcataaacgtgacgagactctaacacatattgctgacccgtgtaggggttctgattttgccccagataatcaatcaacagctcgaaaggacgtaccgccgggttgactaccaccgccggaatgctgaaacactgggaaagccaggtggcaaaatatccacccagcgaggagccgacaatgcccagattctgcccggccttgctcataatgatatcttccagcatttccgccgcctctgccggaaacggcggcaactgcggtaccaacatgtcaatgtgcggatgattttcctgcagccagcttttgaacgcggtggctttcgccgactgcggagagctgttgaaaccatgcagataaagaagagtattcatcaatagccgtccgcatccatattggggttgaactcgtcactgtccaggcggcgtacttccgtttccagcgtaccgcccggcaataaatcgaggtaacgccatcccggcgctacggtatccagagtaaagttagtacagtgcggtttgaattgcacgcaggttgacgggctggccagcagccgcttgccataccaatcaagatccaattcctgatgaatatgtccgcacagcagcgtagtgacgcgcggatagcgaatcaatacatcggccagcatatgagcgttgcgcagactgtgttgatccaaccaggtacaacctgacggcatcggatggtgatgtagcaaaatcaaagtgtagcgttctggatgagcctgtaagcagcgttccatccactctagctgatgttcgcttaattcaccgtaaggcacaccaaaaacctggctgtccaataagagaatctgccagttatcgcctacaaacgcctgttttgatggcgcaatatttgccgcggccagcacatctaccattgccggctggaaatcatgatttcccggcaaccaaaggcatggcgcagacaaacgggcaataccctgcgcaaaatgctgataagccgctatagactgatcctgcgccagatcgccggtcgcaacgatcagatcgtaggagtacttttcggcaataattgcatccaataccgcccgatagctgcgtccggtattgacacccagcaaggtttcatcctcaccggcaaaaaggtgggtatctgttatttgtaatattctgaccctggccccactcgccataggcagttcaaacaggctttccaattggtatccttgttttaagtctgtctaacaaaccggaaccgccacagctccatgcgccaagcaatagcgcaaccagtcagcaagaaactggttaatttgatgcttttcgtcccgttgatgcaactttttattcggataatcataacttgctttgaaccgggagatctgctgactggcacacacttccgctaccctggcatcatggtaaaggcgtaccgacatcgaaggcagcccccaatggccgacgactggcgcagtctgcacaatctcaaccaccgtagtgtagcgagtcgattccaagatagttaatcgataacagatgctattgacctgataagccatgctttcattcacttcgtcagtgcgcggcgttaaacgacgcaattgtgcgtaattagtttcgcacacccgcatcatttcaggaaaatcaggcgtatagcgtttagacattatttttcccactcttttctcagcaactgatggtgcaacgccagccattgtaatgcaatgaccgaagcggcgttatcgataacgccttcttccacccagcggtaggcctgctcgcggctaaccacgtggacgcgaatatcttcattctcttcttccagaccgtgaataccggaggccgtggtggcatccacttcaccgaccataatcgataaacgctcgctggtaccaccggggctggccagataactcaataccggtttacagcgcccaacgatgatacctgcctcttcctgcgcttcgcggcgggcgacctcttccacactctcccccggctcgatcatgccagcgaccatctccagtagccaaggagactcactggaatcaatagctgcgatacgcagttgctccaccagcaccacttcgtcccggatcggatcataaggaagcaaaaccgccgcatggccgcgctcaaaaatctccctttttacctcaccactcatttcaccgttgaataggcgatgacggaagcgatacagattcaatgaaaaaaaaccgctgtaaagtgactcacgtgcaataatttccacatcattcttattcaaagttaccggtgactcttggggcaatgacatatacttttctcctacctgagtattgtgccgatatactaattttttatgacactcgttttactgatataaaaagtaaaagtcttcgcgaataaaaaatgataagcggcgggctagctatgctgtctgagtttaaaatagcaagcgtggcggccttatgggaatggttggaagaatactggtttaagtttgtgttagatttaggtaaataaaggcaagatggcacaatcagccaccttatcccattggcagactctgatagaatcggcaacaattcgtctatcgtcagataccatggcaacattttgcgcacaactgctgcacaacaaggaatgcaaatgaagaaactgctcccccttcttatcggactgagccttgccggtttcagtaccatgagccaggcagagaacctgctgcaagtttataaacaagcgcgggacagcaatcccgacttacgtaaatctgccgctgaccgtgatgctgcattcgaaaaaatcaatcaatctcgcagcccgctgttaccacagctcggtttaggcgcaggttatacctataccaacggtttccgcgataacaatggcgtagacagcaattccacctcaggatcgctgcaactgacccaaaccattttcgatatgtcaaaatggcgcgcgctgaccttacaagaaaaagctgccggtattcaggacgtttcgttccagaccagcgaacaatcgttaatcctgaccaccgctaccgcctatttcaacgtactgagagcgattgactctctgtcttacgttcaggcgcagaaagaatcggtataccgtcagttggatcaaaccactcagcgttttaacgtcggtctggatccaatcaccgacgtacaaaacgcccgcgccagctatgacactgtgctggccgatgaagtgacggcgcgtaataatctggataacgcactggaagttctgcgtcaggtcaccggcgtttactacccggaactggcctctctgaacgttgaacgtttgaaaaccgataaaccagacgcagtcaataacctgttgaaagaagcagaaaaacgcaacctggcgttgctgactgctcgcttaaatcaggatttggctcgtgagcagattaaagcggccgaaactggctatatgccaacgattgatctgaccgcttcttcatcaattactaatacccgttacagcggtagcgccagttcgcagcaaatcaataatgacgctggtcagaacaaaatcggcgtgcagcttagcctgccattatacagcggcggagcaaccaactcggcggttaaacaggcgcagttcaactttgttggcgccagcgagcagttggaaagcgcacaccgtggcgtcgtgcagaacgttcgttcctcgtttaacaacatttcggcatcaatcagcagcatcaatgcctacaaacaggttgtgatttcagcccaaagttcattggatgccattgaagccggttatcaggtgggaactcgtaccattctggatgtgttgactgcaaccaccacgttgtacaatgcaaaacagcagttagccaatgcccgttatgactatctgatcaatcagttaaacattaaatctgctctgggtactctgaatcagaacgatttgatgtcgctgaacgcagtattggataagccggttccaactgcaccagacgctgtggcgcccgagggtaaacagcaacctgcgggcagcgacgcacagaccgcgtctcaaactgtgccggtgactcagccagcggcggcgacaacccgcagttctggtaatccattccgcaactgattctgacgtcggcctttccccaaggccgacattcttcgggcgtagcattgtatacgcccgattattacttttctcatgatttcctccactttagggacaagcatttttcatcgatgaaaaaagagagctagcccgcagcatttcgtatagcaatgtaaagtatgccgctgacctccccctgcgctttaattttatacatctttcccctattcttatggccacgctatatgactataaatgggataaagggcaaaaagcccggacacaggaccaatgacgatgaaacggactaaaaacatcaatcaagagacattccgtaaatcctggcgtaactatcgcttagcgcctgtcgcgttggcggtcagtgccgtatttatgcttgccggttgcgaaaaaaccgatgaaaccgtctctctgtaccagaatgcagacgactgctcacaggcaaatccatctaaaagcgccgaatgcactgcgtcttacaataatgccttgcaggaagcggctaaaaccgcgcctaaatatgcaacgcgtgcagactgtgtggctgaatttggtgagtctcagtgtactcaggcaccggctcaggccggtatggctccgacttcagcacccgcagaagctggcgcaacggcgcagccacagcagagcggcagtatgtggatgcctctgatggccggttacatgatgggccgaatgatgggcggcggcgcaagccaaccactgtttacctctaaatcagcaggcagcccggctaacggcaaatttgttgacgcaaccggtaaaaactacggccctgctaccaccggtcgtaccatgaccgtgcctaaaaccgcgctggcaccaaaacctgcggtaaccaacactatcactcgcggtggcttcggtgaatcagtagccaaacagacctctatgcagcgcagcaatgcttcatcatccaattccagctcgcgcagtatgggtggctaaggtctgattaatgaaacgtttaccgattaccgagcgtccagactggcgcgaaaaggcgaccgagtttggctttaaatttcacaccatgtatggcgagccgtactggtgtgaggatgcctactacgaatttacgctggcgcagattgaagagctggaagataccacggcagaattgcatcaaatgtgcctgcaggtggtagaaaaggtcattaatagcgatgagctgatggcaaaattccgcattcctaaacatgtttgggatttcgtccgcacttcgtggcgcaccaaccagccttctctctattcccgccttgatttagcctacgacggtaaaagtccggccaagttactggaaaataacgcagatacgccaacgtcactgtatgaagcggcattcttccaatggctgtggctggaagatcagatcaacgctggcaatctgagcggcgatgcagatcagttcaacagcctgcaggaaaagctaatcgaacgctttactgaactgcgggaaaaccacggttttagcctgttgcatctggcctgctgtcaggacaccgaagaagatcgcggtacggtgcaatatctacaagattgtgctcttgaggccggattaccaaccgaattcctgtttatggaagaaatcggcctgggtgaaaaagggcaatttaccgatctggataaccaggttatcagtaatttgttcaagctctatccatgggaattcatgttccgcgaaatgttctccaccaagctggaagacgcgggcgttcgctggctggaaccggcgtggaaaagcattatttccaacaaagcactgctgccgctgctgtgggagatgttccctaatcacccaaatctactgccagcatactttgccgaagacgaccatccgccgctggatcactatgtgaccaagcctttgttctcacgggaaggtgccaatatccagatcgtggaaaatggcaaagaagtggcccgcgtggatggcccttacggtgaagaaggcatgatcgtacagcaattccatccgttgccacgctttggcgatagctacacgctgattggcagctggttgatcaacgatcagccctgcggtattggtctgcgcgaagatcgcgaattgatcacgcaggatctgtctcgattctacccacatattatttttggctaatccccaactatgatgtgcaaaagggaaggcaatcgctttcccttcttatatttataaaaccacttatatcaatcaaatcattagcctaaacgaaccgacagcatactcagcgatcccatttcgattccttcggtcggtagagaaatagcttcttttccgtcccaggctcccaaaatatacagcagcggcaggaagtgttccggagtcgggtttgacagcgccgcgccctcatgatccataaaatggaccagtggatggttatccccctgataatcaaggttatccctgacgtactgttcaaaagattcggcccacggataagggctagcctctcccttccagttaaccattctcaggttatgaaccacgttaccactggccacaatcagcacaccctgctcacgtagcaccgccagcttacgccctaattcatagtgataagccgctggctgggtaccatcaacactgagttgcaccaccggaatatcggcgtcagggtacattttaattaacactccccaagctccgtgatccaaaccccattcgcgggtatcggccatcacttcagcaggtttcagcagttgctgaatttgctctgcaagctcaggcgaaccgggagccggatactgagtatcaaacaaagcctgtggaaatccgccaaaatcgtgaatagtccgcggttttcccattgctgttaccgcagttccacgggtataccagtgggcggaaatagccaaaatcgctttcggcctaggaatcgccttacccaacgcacgccatgccaaggtatgactgttttcttccagcacgttcatcgggctaccgtggccgagaaacagtgcaggcatacgagaggtgttcataggaaatccttacagttaaatgaaattatcaggctctagctacaggttggtcgccagaccttgcaactacattacgcgctttcttttcattgcacagccggataaccatgaagaagatagtcaagaaatttgaatgtatagcgagggaagacaaagcgggaatccacagcggaaacagaaatgaaaaaaccgggctattttacctgttaaggaaaataaaacccggttaactcagtcagttaaatcagacagcattcagaatgctgctaaccaaactcagctggctttctgtgcatgagccaagcggtattccgccaggtcatcaatagtcactactggcatatcatgctgtttagcaaaggcaatcacttctggcgcatgcgccatgctgccatcgtcattggtcaattcgcacagtacgcctgcgggtttaaaaccggccagcgttgccaagtcaatggatgcttcggtatgaccacgacgagtcagtacgccacccggttgaccgcgcagtgggaaaacgtggcctggacggctaagatccgcaggtgccgcgttatccgcaatggccgcacgaatggtggtcaagcggtcagcggcagatacgcccgtagtaacgcctttagcggcttcaatagtcacggtgaatgcggtctggaactggctggagttgttggtcaccatcattggcaactcaagctgctgacgacgttcttcggtgatacacagacacacaatcccactgccgtgacgaattgtcagagccatttgttctacggtcatggtttctgcggcgaagacaagatcgccttcgttttcgcggttttcgtcgtctagcaccatcacacctttgccattacgcaaggcgtccaatgcacgctctacacgctcgaaaggcgtgccaaaatctgatagaagggtctgattcatggtaaaaaacctcattaaattatggattaccagaatcagggcggtcttgaggagtgttcgccaaatatacggcaaaaataacgcaagcgggcagtatgcccggcagataccgttactctctcccatccggactataaccgtcggccccggaattacaccggatctgctgacctctacgctgaatgaaattaaccactcaatgtgagcgctcgcgggcttccacaacgcgatacaaaagtacctaactatggtttaccgccggtggggactttcaccccgccctgagaataagcgtaaagactataacgctaatgattcgtccgggcaattggcaaaatgcagaattaaaccctggtcacaaaggtttatagaattgacgccaggcattacactattaggcaatcactaaacatcaaattagggaaataccatgattgacccgaaaaaaattgaacaaatcgcccgccaggtgcatgaatccatgccgaaaggtatccgcgagttcggggatgacgtcgaaaagaaaatccgccaggtgctgcaatcgcaactgactcgtttggatttggttaatcgtgaagatttcgacgtgcaaacgcaggtgttactgcgcacccgcgaaaaactggcaatgttggaacagcggatgagcgagctggaagccaaatttaacgcggcgccagttgctgcgcaggacgaagccgagaaaaccggcgagtaattatttccagcgttcagcttaaaggggctagaatgccccttttttcgttgataaaaaacatcttaatgttagccgatgagtcagcgatcaaccgttgatatggttgtttttggcaaaatgagccaaagtcccgcaaacataaccagagcgtataaactcttccacccaatcatcaacagcaatatgcagcacagcaggctgccaatcatcgccatccagcgtgaacgccctttcaacaagcgaatacccgccaacatacacagcaaataaatcagcacgaaaataccgttggcgtagacgatcagcatatccagcggcagagaaaaccaataagtcagcaacgtagcagccagacagcaacccactacggcgctaagggcattgaccggcgtttggccagcggataagcgagccaaagggctttctgggcgactgacagcctgtgaccacaccatgcgagcaaaactctgggtataaatattcacactggcgaagcacgccagatagccaataatacaagcgacccaaagtgcgcgctgaccaaaaagttgcaccactatgcccggtagagatgcggccgcggcctgctctgtgccataggcatggaaatggagtacggcaacggtacaaccccagtaaaccgcaccggccaccaacatgccgatcagcaaggcgcgaggaaaatcccgtttaggatggcggaattctgtcgccagatgcgcaaaggcttccagaccgacaaaacaccagaacattaccgctaatgcattgaatatattaggaggagaaacatcggtaatcgctggccagggaatctgagcggggctgatatccccccgccaccaaatcgccgcaaccagagcgataatcaacagggcaatcagagtttgaatattggcgctggaacctgcgctacgggtgcccagtagccaaatcaccagtaaagtagccagttgcactatcagcaagccggtagcactccagccaaagatggcctgccagaagccagcggcaatctgcaatgccgctggtaaccccacgggaatcaccgataaaaacagccagcccgccactttacccaaacgtgggccaaacgccatattgacgaaatgagccgcgccaccagcactagggaaatgacgccccagcgcggcgaaggcgatagcaatagggaacaccagggcaatcagcagtggccacgcccataggctgtcgtcgcccgccagcatggcggctaacgccggtacagcaaatacgccggtgcccagcaaggacgtagataacaaaccaacgccctgcgccaaccccaactcctgcttcaatccactcaccgtaccgccttatgccattggccatggcgcagcatccttaccctgattcagcggattgagttaaccgcgcccgtttttgatcgactgaataatattagtagtggaaacaccgtcttcaaagttaagtaccttaacttcaccgcctgcggcccagacttcagcgctaccggcgatatcttcaggcttatagtctccgcccttcaccagtaaatctggtagaacaccagcaattaagcgctgtggcgtgtcttcttcgaaagaaacgacccaatcaacagactccaacgcacccaacacaatcatgcgttgatccaacgggttaaccggacgtttctctcctttcaggcgtttagtggacgcatcactgttaaccgcgacaatcaaacgatcgcccagtttacgggcgttagccagataagagacatgacctgcgtgcaggatgtcaaaaattccgttggtcatgacgattttttcaccgcgctgacgcgcctgagccaccgcagttttaagctgttcttcggtcatcacgccaaaaccagtactggcacggccacggatggcgttttccagttcgatcggagaaaccgttgaagtacccagcttgcccaccacgacacctgcggcggcgttcgccaggaagcaagattcttccagcgttttacccgcggccaatgccgaagccaatacgccaatcacagtgtcacccgcgccggttacatcgaacacttcctgcgcctgagttggtaagtgcagcggcggctgccccagttgcaacaaggtcattccctgctcggagcgcgtcaccagcagcgctgacagctcgaaatcagcaaccagtttcataccgcgactcactaactcatcttcggttttacaatgccctactaccgcctcaaattcagacagattaggcgtcagcagggttgcaccgcgatagcgttcaaaatcactgcctttcggatcgataagcactggtaccttagccgcacgcgccaattttatcatctgctgaacgctaaccagagcgcctttggcgtagtcagaaagcaccaatgcgccaatatgaggcaatgcctgctggatacgatcaaacataggctgaggatcgacaccgtcaaatccttcttcaaaatcaaggcggatcaactgttggttacgggaaagcacccgcagcttggtaatggtaggatgcgttggcagagacacaaaatcacagcgcacgttgacttcattcagcttgctggtcaacgcccgcgccgcatcatcaatgccggttaagccaaccaactgtgacgcggcacccagggaggcgatattcatagcaacgttagctgcaccacccggacgctcttcgatagtgtccactttcaccactggcaccggtgcttccggcgatatccgactggtcggcccataccaataacggtccaacatcacgtcgccaaccaccagtacaccagcgcggcgaaaatcgggcagtgtaactttcatcccatagctccaaaacagatcattatattgtggcggataatatcacaggctttcgtttaccaataaaatcggttttgccttattacctcaggtagatgaatttcagtacaggcaaagggatttgaatagcggttttttccccttttgcgcagtgcatggcaaaaaaccggtgtcagaggcaacatgccgcaatgaaaagggctatccacttcccatccactgccaatttcaatttacaggtcagaaaaaggggcgatattcgccctacagactatttccaatagataattaataaaaatgataagaaaagtgaaatagttatcccagccaatgttgccagctagcggccacctgctctctctcggcaataaagcaatcggcggcaactttgctggatagctcctgtaaagccagatggtgaatctcatcccgcatggtgacgtaggcttgggtcaacgccaccgcttcctgctgttccataatgccgtaattggccatcagctcgaaaatacgcacgttatcagaccaacgggttaaacgcggctcaccggcggcgtagcgcaataccagatactgggcgataaactcgatatcggtaatacctcccgcatcggctttaatatcaaaggtatcccgctgtttactgcctaagtgattgcgcattttctcacgcatttcgcgcacttcctgctgcaatgtcagatcgttacgcggttgacacaaaatacgctggcgaatggccacaaattcctgctgcaggctttcatcgccatacaccatgcgtgcccgcaccagcgcctgatgttcccaggtccaagcttcgctttgctgatattctgcaaaggcttcaatggtgctcaccagcatccctgactcaccggaagggcgtaagcgtgcatccacttcatataaaatacccgatgaagtgcgggtgctaaacagatgcatcacgcgctgcgccagacgcagatagaactggcggccatcgatactgcgctcgccgtccgtcatcacatctaacggacagtccagcaggaaaaccaagtctagatcagagctatatcccagttcccatccgcccagtttgccataaccaatgacggcaaaaccgcgcccttcccgattttgtaaatgagttggctggccgtagcgtttgaccatttgattccaggcttgttgaatcaccgcgtcaataatggcttcggcaagataggttaagtgatcgctcactttcattaccggcagcgcttcagtgatatcgccggcagcaattcgtagctgctgcgcctgtttaaactgacgcaacgcttccagttgttgctcctcgtcatcctccggcacccgcagtaaatactgacgcaattcatcacgataagcgccaggagcaaggggttgatacagcgaatgaggatcgagtaattcatccaataaaagcgggtaacgcgcaagctggctggccaccatcggtgaagcggcgcacagcttaataacgtgagtcagcgctgcatggtattccagcagcagctccagataggtggtacgggtcacaatgctcaacagcagttgaatcaggcggcttagagcgatatccgcatcgcgacgcggacaaacctccgccagcaaacgcggcatcagttgatccagcttatcccgaccgcgcggcccaatggtgcgtttatccacgtcatgacggaaagaagcgagcgtgctaaggaagtgtctgcgcgcatgttcatctaaatgcggagtcaagggcgccaaatcaccttcatccaacgcatcctgccacagactgttatacgaaacatagcaggcatcttcgccaacatcaggggtatcatcgccaattagatcgtcaaataccaaacgaacggactgcatgtgattgtccagcgcatccgtcagctccgcccaattccgtttccccattccccacgccagacgcgcttgattcagcccatcactcggcaaagtttgggtttgttcatcaccaatcgcctgtaaaagattctctaaacggcgtaaaaacaggtagctggtgcagagatagtcaacctgccgctgagtgagtaatcccagctctgataccgcctgtagcgtgggcagcaacgctcgttcctgcaaacgcggctcgcggccaccgcgaatcaattggaatacctgcgtaataaattcgatttcccgaattccacctgcgcccagttttatattgtcttttaggccgcggcgtcgtacttcgcgggcgatcatgcctttcatattacgcagcgattgaatcacgctaaaatctatatagcgacggaatacgaaaggccgcagagttcgacgcagttcctggctataataatcctccgcaccgcccatcagccgcgccttcaccatcgcataacgttcccaatcgcgaccttgttcctgataatagtcttccagcgcggcgaagctcagcaccagcgggccgctatcgccaaagggacgcagccgcatatcgacccgatagacaaaaccatcaatagtttgctgatccaacgcctttatcagccgctgccctaaacgagtaaagaactgcgcgttatccagctcccggcggccaccttgggtatggccattttccggataagagaaaatcagatcgatatcagaggaaaagttcagttctccgccgcctagctttcccatccctaaaatcagcaaaggttgtggaactccctcgctattacaaggcgttccccattctttgcagcaggtttgatacagccaatcgcggctggcaataataatgctttccgccagcccgctcagctgttgcaaggtttcttccgtggtactggtctgcaacgcctgcgaccacgcaatacgcaccatcattcgccgcctgaataagcgcagtgccttcatcagcgcggcttcatcctgcacttcgctcagcacctggcccagccaatccgggtatcgtggccactcatccgcctgcggcggctgctggtgtagctcatccaaccattcgggatgaatcaacaacatatcactgacaaaatcacttagcgtcagcactgcaacgtcttcttctgttaacgtccggcttatcggaagctcatgaaaacgctgtacaatactttgcgcttgcacctgtaattctgaggagagtggcaacatttcgaatccctatacaaaacagcctgcaaaaagcaggctgttaatcagttaacgcgcagctccgttgagccagaaagcgggctgagccaacgcctctttacgggcggtatcacgccagtgtccctgacgttcaacaatagcctgttgcagaccaaaccatccatcaatgtatggatgccattcgctctgcggatagaaaccggataatagctggaaagaaagaatctgacgattcaagcgaggcaactgcgccagatagccatcgtcatccatatgatgtgtaaaggcttctttcaaatctgcagcgctgcgactcagcataatatcagcaaaacgcttaaaggaaccctgtagctttgactgccctttagcatcgaggaacggacgccagccagcgttaaccagccaagatgtgagcgccaacttacatttaagataagcggcgctgtagcacaattgttccgcctcggcatttttcgccgccagtaaaggttccagctcggtcaagagtgcccgcagctcagtgctggctttacgtggcaccaaaccaccaaataccgtcatgatctgacgaatcatcgctaacgcttcgattatcatggcttttgctgattcatcgccacgcagccacagttcttcatggtattgccagtgatccaaggccatttccagacccgcagacattccctgctcaacggtagacttaggcgcaggctgcaccaccaacaacggacgaacttcccgcgccggattgccttttgccaaatggtagccgcgcgcagctttactcaggctcccctgacgcagaccgccgttttgcgccagttctgccgccaacgccagaagatccgcctgattcccctgctttagctccagctccacttcgtgcaaagcttcgctgagatcgttggctgtaacattgcccagatccaaagccagttcaatcaggctttgctggtaagtaactacccacttttcacgcacaaagtcggtctggaatagtggtttcagttcagcctgaagtgcggtgacatcccagccttccggccagatttccacaggaaattgcgccaaatccaactctggtttatcaatagtgacattatattctgggcgctgatgcaaaccgccgaccaccttgccaccggtttttatcgtcatttcaaattgcccatcacagccgcgaatacgtaagcccatatcatgctcgcgcaggcgaccgtcttcggtttcaaagtagatattggtcagcgtttgtggcgcgaaatgttcatgtggccaggacgcaatctggcccggcaaggcagcaatggctgctggagtagcgataaattttaattctatttcaacggtcataatttcattcacaccgatatttgcgagattatgggcattatgcgccattcgcgataatttgcctgttttacaccgctttttctgtacgaaaagtctcgtgcagcaggcgagtcaaaccctattttaacctgatttgccgagtctgccctactagcttgatcagactaattttagtttctgaaaaaccggcgaaaatcgcgctaaacccgcactggcattgagagtaagatagttctcattccggtttatgcgttgcgtcggcaaactgaaccctctactatcgttccataaattcactcataaacgatgatctaatgcagaaattacgcctaatttgtctcgcagtgctaagtctaagcatcagttggggcgcgcacgctgaagaaaaacgctacatctccgatgagctaatcacctacgtccatagcggccccggtaaccaataccgcattctcggcacgctaaatgccggcgatgaagtcaccctgatcagcgttaacgaagcggcagattatggccaaattcgcgacagtaaagggcgtaccacttggatcccaatggatcaattgagtcagtcgccaagtatgcgagtgcgtttacctgatttggaacaacaggttaaaaccctgacggacaaactggctaatattgataatagctggaatcagcgtaccgctgaaatgcagcagaaagttgcggccagcgacggcgtgattaacgcgctgaaacaagaaaatgcagcgctgaaaaaccaattggttgtcgcgcagaagaaagtgaacgccgtcaacctacagttggatgacaagcagcgcaccattattctgcaatggtttatgtacggtggcggcgttgccggtatcggtctgctgctgggtctggtattgccgcaccttatcccaagccgtaagaaaaataaccgctggatgaattaatcgcggaaactgtagattgaatcctatcggctgccatcaggcggccgattttatttgctcgccccacctcgctatactctggtcaggccttaagcctcttatttcagaatcatcgatacaatcggtatcaggagaataacagtgaatatctacctggtcggcggtgccgtacgcgacaatttattaaatctgccggtcaccgagcgggattgggtagtggtcggtgccactcctgagcagttgctttctctaggttatcagcaggtcggcaaggatttcccggtattccttcatccggtcagccgtgaagaatatgctttggcacgtaccgagcgaaaatccggtcagggttacaccggctttacctgctatgccgcaccggacgtcacgctggaagaagatttactccgtcgggatctgaccatcaacgccattgcccgtagcgcggaaggcgaactttttgatccttatcatggccaaaaggatctggaaaaccgcattttgcgccatgtttctgacgcctttggcgaagatccactacgcgtactgcgagtcgcccgctttgccgctcgctttgctcatctgggcttttctatcgcgccagagactcagatattaatgcgccaaatggccgacagcggcgagctttcggcgctcacgccagagcgcgtatggaaagaaacagaaaaagccttaatcagccagagtccacaaacctattttcaggttttacgcgactgcggcgcgctggctgtgctgttcccggaaattgacgcgctgtttggcgtgcctgctccggagaaatggcatccagagattgataccggtatccatactttgatgacgctggccattgccgcacagcttagtccagacattgatattcgcttcgccgcactgtgccacgatttaggcaagggactgacgcccaaagaattctggccgcgtcaccacggccatggccccgcaggtgtcaaacgggtagagaaaatgtgccaacgcctgcgagtacccaatcctattcgggatttggcaaaactagtggcggaatatcacgatttgattcataccgtcgataaattgcgcccggaaaccctactcaagttgtttgacgccattgacgtctggcgcaaaccggaacgtttagagcaaatgattatgaccagcgaagccgatgcccgtgggcgcaccggttttgaaaataatccttatccgcagggcgattatctgcgcgcggcctatcaggttgctaatggcgtgtcgatcaaggaagtggttgccagcggcctgcaaggtctggcgattagggatgaagtcaaacgtcgccgccagcaagcgttggcagactggaaactgactctctgcgaaactaaccagaacagcgaatttcaataaacaggtgtaaaaaagccctgttaaatcagggctttttttggcatttattaacttaaaaagtttacataaatacccaatacactgccgcggccactacaaaacggtaaatagcgaaaggcacaaacgagattcgcttaatcaatgacaggaaggttttgatagcaatcagcgccaccacgaatgccgtagcaaaaccaacggcaaacatcggtaaatcgcccaaagtcaggaagtgcaggctcttatacaaatccaatccgctggcacccaacatcataggtacggccagaataaacgaaaattcagatgctgcataacggctcacgccggtcagcataccgccagaaatggtcgccccagagcgggagaagcccggccacagagctaaacactggaagcagccaatcataaatgcctgacgatacgtaatatcgtccaacccaaccgctttagggtttttaggtttcagccattccgccgccagcagcagcaggccgccgaccaccaaggcgtacatcacactttgaggctgaaacaatgactttatcgcatcgtggaataccagacccaagacgaccgccggaatcatggccaataatatgtgcccgagcgttaaatgaccgccggtctggccatcgttagccactttcttaccgccaaagtggataccgatcaggccgaacaacctgcgccagaacaccacgaccacggccagaatcgagcctaactggatgataacttcgaaagtttcagctttctcaccggtaaagcccaagagatggcccacgatgatcatatgtccggttgatgatactggtagaaactcggttaaaccttcgaccacgcccagaataaatgccacaaacagcgaatacatatccgtcatctacgctacccatacccaataagagaaaaccacaaaaaaacggcaatgttatagaaaaacactgccgtttaaattctattaaattgaaaacatcaaccgccgtaatatgaccagcttatcaatggatggtttcatttttatggcactttgtcgccagaaaaatcagcaggttcgctcaccgcgttcaattattacgccgacgttgcgagcttccgctactgcgccaggtttgctgaccttgattctcacccagggagaagcaaaacgctgcaataatatttcggcaacttcttctgccactcgctcaaccaatgcaaaacgctggccttcgacgtgtttcaagatggcatcgctgatatcagcatagcttaaacaatcgctgacatcgtcactggcggccgctttgcggttattccatcccatttcgatatcgaacactaacttctgtttaatagtctgttcccagtcataaacaccgatggtggtaatcacgctgagttcttcaataaatacgatgtccatcacgtcattctctgtttttgtgcctaccggatatcacttccagccgaatatgcgtattatccactgatgttgcgattaaaacgaccattattaaacggggcggcgttatgagtgctatcgcgcttggtatgattctcttcgcgtatttgtgtggctcaatttccagcgcgattctggtgtgtcgaatcgctaaattacccgatccgcgtgaaaacggttcagggaatcccggagcgaccaacgtattacgcatcggcggccgcacggcagcggcggcagtattagtgtttgatgtgataaaaggtatgctgccggtatggatcgcttatcttctgcatgtttcccctctttaccttggcattaccgctatcgccgcctgtctgggccatatctatccggtattctttaattttcgcggtggcaagggcgtagcgacggcttttggtgctatcgcacctatcggctgggatctcacgggtttaatgacaggaacctggctgctaacagtactgttgagcggttactcctcattaggtgcgattgtcagcgccctgatagccccgttttatgtctggtggtttaaaccacagtttaccttcccggtcgctatgctttcctgcctgattctgatgcgtcaccacgataatattcagcgtttatggcgcggtcaggaaagtaaaatttgggacaagttgaagaagaaaagacagaaaaccgctgccgaagaagcagaagaacaggagttggaagactgatttagcgctcgtccgctcccgtaactcagttctgatgacagagcgagagcgaggcaagcgctgaggattaaaaaagcggagtgagtgggctaaaatccatgaacattttgaatgactgcggcaacgcagccgcagccctgcctagactttcggaagttcagccaacggccaacgtggcctaaccgacaccgtcaactcgctattcacaccagttttcagcctaatcatgcccgcataagcgatcatcgcgccattatctgtgcaaaattcaggacgagcgtagaacacttcgccgccgcgtttttgcatcatttcggctaatttacgacgcaatgtggtgttggcgctcaccccaccggcgataactaaacgtttgaagccggtttgatccagcgcccgtctacatttgattgctaatgtatccacgaccgcatcttcaaaggcgcgagcaatatcggcgcgagtctgatcgtcattaccgttggcgcgaatggtattggcggcaaaggttttcaggccggaaaagctaaaatctagccccggacggtcagtcattggccgagggaacgtgaagcgggaagcatccccttgttgagccatacgtgacagcatcggcccgccgggataatccagacctaacagctttgcggttttatcgaaagcttcaccagccgcatcatcaacggattcaccaagcagttggtattcgccaatgccggtcacgctgattaattgcgtatgaccgccggaaaccagcaaagcgacaaacggaaactctggcgcgttttcttccagcataggcgccaacaggtggccttccatatgatgaaccggcaccgcaggcacattccaggcaaaagccaacgcgcggccaatggtggcaccaaccagcaaagcaccgaccaaacccggcccggcggtataggctacgccgtcgatatcttccggtttcagattggcttcttttaaagcagcctgaatcagcggtacggtttttcgcacgtgatcgcgcgaggccagttcaggaactacgccgccgtaatctgcgtgtaatttgacctgactgtataattggttggctaacagaccggtttcatcgtcataaactgcaattccggtttcatcgcaggatgtttctatacccaagactcgcattacatttcccatcattcacgtgcggcggacagtttaccacaaccgtgaggacagtcatggtttctgctattgactgtttatttagtttttcagaaaacatcatttccctatgcaatggcctgatttctctgcggaaggtcgccagaatgttgttgagtctcactataattgaaaaaattgttgattcgttcgacccgaaccgctgtttagtatataatcagcgcccgccgcacttctgataataaaacagtggtcggtcatacaggggcgtgcctgtttcaatttgctgtggtgctttacaacgcagcatccattgaagtaaaattccgcaccattttgagaaggctggcacttggccagcagaaaccgatttctattgaggtgagaggcacatgccggtaattaaagtacgtgaaaacgagccattcgacgtagctcttcgtcgtttcaaacgttcctgcgaaaaagcaggtgttttagctgaagttcgtcgtcgtgagttctatgaaaaaccgactaccgaacgtaaacgcgctaaagcttctgctgtaaaacgtcacgcgaagaaattggctcgcgaaaacgcacgccgcactcgtctgtattaattcttcgggggcaaccccgcagcgtgatttgttagtttctaagaacgcgcagaccgagtagttgcaacgaaggccgtgctttccgaaaggaatgcgcggcttattctcgtttatggactagcgaataggggcttatggctggacgaattccgcgggtatttatcaatgacttgctggctagaaccgacatcgtcgatcttatcgatgcccgggtaaagctgaagaagcaaggcaaaaattatcacgcgtgttgtccgttccatcatgagaaaacaccctcattcaccgttaatggcgaaaagcagttttatcactgttttggctgtggtgcccacggcaacgcggtagattttttgatgaattacgatcgactggagtttgtcgaaagtatcgaagaattagctaccatgcacgggctggaagtgccttacgaggcaggaaccggcagcacgcagatcgaacgtcatcaacgacaaagtctttatcaattgatggatcagcttagcgctttctatcagcagtcactcaatagcccatcagctaaacaggcacgtggttatctcgaacaccgcggtttgagtgaagatattatccaccatttcgccattggttttgctcccgcaggttgggacaatgccttaaaacgctttggtcgtgatgccgaaagtcgtaccgcactgaacgatgccggtatgctggtgactaatgatacagggcgaacttacgaccgtttccgtgaacgcgttatgttcccaattcgcgataagcgcgggcgagtaatcgcttttggtggtcgtattctgggggacggtgttcccaaatacctcaactcaccggaaacagaaatttttcataagggtcgccagttatacggcttgtatgaagcacaggttattcatcccaatccaacgcgtttactcgtggtggaggggtatatggatgtggtggcgttagcgcaatttggcattgattatgccgttgcctcacttggaacctcaacgacggctgaacatattcagctgctgttccgcgccaccgatcaggttatttgctgttatgacggcgaccgggctggccgagatgccgcctggcgggcattggaaaccgctctgccctatttgaacgatggccgtcagctacgttttatgtttttacctgacggagaagatcccgatacgctggtgcgtaaagaaggtaaagaggcgttcgaacaaaggatggagcaggcgcagccgctatcaaccttcttgttcgaaactctcatgccgcaggtcgatttgagcagccccgatgggcgagccaaattaagtaccttggcgctgcctttaatcagccaggtgccgggagaaacgctgcggctttatctgcgccagcagttaggtaacaaattaggcatcctggatgatagtcagctagataagctgatgcctaaacaggctgaaaacacgaatacctaccaaccgccccagctaaaacgcacaaccatgcgtatacttatagggctactggtacaaaacccgcaactggctacacttattccctcactacagggagttgagcaggcgaaactggctggattaccgctatttattgagctggtaaatacctgtttggctcagccggggctgacgacaggccaattgctggaacagtatcgtgataataaattcagtcaacagcttgaaaccttggcaacttggaaccacatgattgctgaggagatggtcgagccgacctttgtcgatacgctggcgagtctgtatgactcaattttggaacagcgtcaggaaacattgattgcccgcgatcgaacacatggattaaacgccgaagaacgtaaagagctttggtctttgaatcttgcgttagccaagaagaaatgaactacccaacggcttaattgccgataaatgcgggggcgaatccctgcaatatgccgccatagcgggcagcggcgaaaaaaaaagccccaaatgctattgttggcggtttcgccgaccgacaccaacccaaatactctgaagtgtggataccgtcttatggagcaaaacccgcagtcacagctgaagctacttgtcacccgtggtaaggagcaaggctatctgacctatgctgaggtcaatgaccatctgccggaagatatcgtcgattccgatcagatcgaagacatcatccagatgattaatgacatgggtatacaggtgctggaagaagcacctgatgccgatgatttaatgctggccgaaaacaccaatgataccgacgatgatgcggctgaagctgctgcacaggtgttgtccagtgtcgaatccgaaattggtcgtacgaccgatccggtccgcatgtatatgcgtgaaatgggtaccgttgagcttctgacccgtgaaggcgagattgatattgccaagcgtatcgaagacggtatcaatcaggtgcaatgttctgttgcagaatatcctgaagctattacttatctgttagagcaatacgatcgcgttgaagctggcgaagcccgcctgtccgacctgatcaccggctttgttgacccgaatgccgaagaagatattgcgccaaccgcaacccacgtaggttcagaattgtccgccgaagagatggacgatgatgacgacgaagatgaagacgaagacgacgacagcgaagacgataacagcatcgatccggaactggcgcgtcaaaaattcagcgacctgcgcgaacaatacgaaaacgcacggaaagaaatcaagaaaaatggccgtagccatgccagcgctgccgctgaaattctgaaactttctgaagttttcaaacagttccgcctagtgcctaagcagtttgactatctggtcaacaacatgcgcaccatgatggatcgcgttcgtactcaagaacgtatcatcatgaagctgtgcgttgagcagtgcaaaatgccgaagaaaaacttcgtcacgctgtttgccagcaacgaaaccagcgatacctggtttgctgcggctgtcgcgatgggtaaaccatggtctgaaaaactgaaagacgtagcggaagatgtccaacgtagcctgcaaaaactgcgtcagatcgaagaagaaaccggtctgaccatcgagcaagtgaaagatatcaaccgtcgtatgtctatcggcgaagcgaaagctcgtcgtgcgaagaaagaaatggtcgaggcgaacttgcgtctggttatttctatcgctaaaaaatacaccaatcgcggcctgcaattccttgatttaattcaggaaggcaacatcggcttgatgaaagcggtagataagtttgaataccgtcgtggttataagttctcgacttatgccacttggtggattcgtcaggcaattacccgttccatcgcagaccaggcgcgcaccatccgcattccggtgcatatgattgagacaattaacaaactcaaccgtatctcccgtcagatgttgcaggaaatgggtcgtgaacctaccccggaagaattagcagaacgtatgctgatgccggaagacaagatccgcaaagtgctgaagatcgcgaaagagccgatctcaatggaaacgccaattggtgatgatgaagattcacatctgggcgatttcatcgaagatactacgctggagctgccgctggattctgctacctcagagagcctgcgttccgcaactcacgacgtgttggctggcttgaccgctcgtgaagcgaaagttctgcgtatgcgttttggtatcgatatgaacactgatcatactttggaagaagttggtaagcagttcgacgtaacccgtgaacgtattcgtcagatcgaagccaaagcgctgcgtaaactgcgccacccaagccgttcagaagttctgcgtagcttccttgacgattaatcgtcagcgcacttgagtcaaaaaaccccggttaaccggggtttttctttatctattatctattctgcatcaactttcatcggctttttcgttcagccgaagataaacctgacgataggcagctactagctcgtccagcgtcgcacgattcaatccgctgggattaggcaatacccaaacctcagtattaccgatctttagctcctgacgcccccactgcattttacgtacgccaaaagcactgctaaaggcctgcttgcctaaaacagccagaatccgaggttggtatagggttattttatcaatcagttcctgcgcgccctgacgcaattctgccgcagataactccgctgccgctaccgtgggccgttctaccaatgcggtaatgccacagtcggtatccagtagttctaattcatcctcaggagccaactggcgtttagtgaacccggccaaatggataactttccaaaagcgattgctcctattggcaaagtgaaaaccgcgattggcgctgctcagccccggattaataccgcaaaataccactttcaaccgtggccgcagaatatctgtaatcataggcacccctgaatgaatgtataaaccatcactcattctatcaacaaatacaaccatctagatttgcacataaaacacgcacatagctcgctaactgtagacctatggctaaaaactaccgtataatcgccgccacatatggccccttagctcagttggttagagcacgcgactcataatcgcttggtcactggttcaagtccagtaggggccaccaaattttagctgttaaatcagtacattaagccaactttcgagttggcttttttgttggctaaaaaggcaatggcgataaaatggcgatagatattttggtgatcggttaattggggcgaaaaaaaacctgctttcgcaggcttcttttacatccacaacaccccttgattatttctacttggatgtggtggcgctggttttgtttcccccggtgacacaattattctgtcaaccgtttcgtgcgtggcgaaagtacaactgcaatttatattctgacactggtgataacgttccttcgtcttctcactcaggtaacggctagaccgagcatgtgcagcggtcttacaaagcgggcaatgcatcatgctcgtatcccctcatctctctgcttatgcaagtatgataacactagaaacgctcaaaaattagctttaagtgaataaaataatcacaaaaccacttattgtgaactcactccgcctcataagtgacatccgacaacaacacttcgagagacaattgggtggtgtagccgctgttgctcaggctgtgcgataccttgctgattatccagctctgttggtctatcaccgatttaaagccgttgaccgcgactggtgtttcaggaaataaatcagcgcgccccatggctaaagtgatagagaactcagcaactccgcgctgtaacttctcccatttagactgggcagcgcgcatggcggctttttgcgtggcgtaaaccgtcgtgataacaaagacattatcctcagcccccgccagataatccccttgtttttcctctaccggctttttctctttagccgctttggtgcgggtcggcttggctttcgggtgttccagtgcgcggagctgtttaaacttcggcttgcgctttaacttaacctttttcggcttggccggtttggggtctttggtgtgcaaccaactggcacttacaccggtatacgcgccccggtcagcaatactaaaactgtgttggtcgccatcttgtcgggtgatcgtcatttgcggaatgggtttaccactggcagtgacaccgctgcccggcttgataaacaacaatcgcccggctttaacggcggccactgcaccattaagcgaggctaaccgggtgataaacttggcgtcagtttcttgtgtctggtcgatatgagagatagcgatatccgccagcccctcggccagcatcgctttcaggttgttgcgctccgccacctgcgccacgactttacccagcgttgtctcatgataagagacttcccgccgcgcattgagcgaactccgaaaatcggcactgcgggcacgaatagtcagtgtgtctggtgcgccatggtgctcgacctcatccacggtaaagtcacctttaccaatcagcgccgaccctttccagcccaagaacaccgacaacgctgcgccgcgttccggcatggcaagctggccgtcagcgtcgtccagttcaacgtcaagctggtcagcttcaaagccccggttatcggtcaggctcagggacaacagccgagggcgaatattctgtgtgatatctttcgcgttaatcgtcagcataaagtccggggccatatccgccccggccggtagagacatgccggtcatcatgagaataatcctccgatagctgcctgtgctttaccggtcattgctgtcgctttacccagcaactcgtcagcctgttgtttcatgtcgccgaacatggccgttaatgactcgtcaacccgcaacagattgagggtgaactcaatgcgccgggcgctaccgtcttcaaataatagcgtgccggtctggctcagactctcgatgacaaacatgccgtaaatcatgccgctaccctcaaccagcggccacgccttgccttggtcagccatcgactcaagggccagcaatgacaggcgaccaccggtcagttccggcagtaatacaccggacagcttaattttctcactgtctacgccaagaaattgcgcggacgggcgcaagcccacccggctgttagtcggccaacggtactcaatatcgcgccccatgctttggtaaggcgtggtctggcgcataaaaacaaataaccccagtgataacatcatgattaatcattctccatctggccgcgctgacgggcgcgcttatcgcgttcgttcttggcaagcgcatcggtcatcattcgctccgcatcctgtctgctcatgcccggcgggatagtcatcttgatatcattggtggtgacactgctatcaatgatagtggtgccagtattggcggtgaccggctgataaccgccgtacaacacaccgccactgggtgagtacccgcccgagtaagggttatctttcggtaccttatcggccagtccgtctgacttggtatcaatgatgccgagtttttccagcacccagtcaatgccactgcgcagggtgtttagcgcattcatgggcagactgagcgccgccgccagaccctcgccgaataacttgcccgcattggtggccctgtccaaggtttcctgtgtggcttttaccggtttaatcaggtcagcgaaccagttcgaaagctgtttcaccttgtcactaaaccagttgaataccggtttaagcggctcaaaggcggcactgattggccccatagcagcgataaagccctcggccacgccagcaataaaggcgctgataggctcccagtatttacggataagcaggccaccggccacaatggccgcgaccactgccactatcggccatgtcagcgccgtgagcgcggcggcaatggttcctgccatcagtgaaaaaccggtactcaataaaccggctccggccaacagcaggttaaacccggccatcaccggccacgcaatcaatcccagcgcacccagcccggcgaccagtgctaatgccgcgccggtgactttggtaatggtgccgaccagctcagggtttttcctggcccatgcagccacattaatcagccagtcggttgcagttagggtcagtttgcgcagcgcggagtcttgcttctcaaagacttcaatctctaagtcttcccatgccgaactcaggtttttcaaatcgccgtcaaggttatccattctgaccgtggcaattgattgcgcggtgccaccggcctgcatcagcttaccttgtttctccgccagcttgccgttaccggcagcagccaccagtttcaccgcgcctttcatcgcctcttcaccgaatatcactttcaggtattcggcttgctgtgcggtgcctagcttgttctttttaaatgagttgttgatgtctttaaggattttcgccaccggcaacatattgcctttgccgtcgcgggttgtaatacccagttctttcagtgcggccggtgcttgcccgacaggcgcttgcaaccggctaaacaccgcactggtactggtgcccgccatgctgcccttgataccgttatcagccagtacaccgagtaacgcggtggtgtcttcaatgctggccccggcagcctcagcaataggggccacatatttcatggcctcacccagttctaacaggttggtgtttgagctggtaaagcctttcgccatcacgtccgacacgcgtttaatctggtctagcggcaggttaaacgccgattgcatgttggtgacaatatccgctgcctcagcaatatccacaccggacgccagcgacaggttaactgtcggctcagtggcggccagaatggcgttagcgtcatagccagaacgtgccagcgtgtcttgggttcgcgctacgtcagtcggggaaaaggcggtggatccgccgatatctcgcgcctgttgacgaatggcggccagcttggcgtcatttttatccagccctaaaatcgcctgagtgcccgacatctggctgtcaaactccatacccggcgcaaccagtttcgctgcgccgtacagcccggcagttgctacgccaagactcgccgcactggtattacgcacggcactggtggcggctttgcctttctggtaacgattgctgatacggttgagttgttcctgtttcaggctcaggcgttgcagttcttggcgctggcgactcagggcaacagtcgcctcggcggcgctactgcgtaaccggcgctgttcactgctcaggtttttggtcgctatcccgtcggcgttaagcgcatcgcgctggcgctgcactgactggcgcagcccgttgtatttggtttgcagttcagccgccgcgcgcttggctccctccatcagtcgggcttgttgagcggtgggtttctcggtgtttttaaaggcgatagccagggccgccgcatcttctttggcttttttcagcgcctgcccggtgacggccagttgggcgctggccttgcggaaaccgtcaatcttcgccgcctgcgcatcaagggatttgatgctgctttgtgtgttgcgaatatccccagtgagggatttactggcggtttgaatggctttaaacgggcgggtggcttggtctactgctttgagcaatacctgtaactgtaagttcttactcattatttacggctccactgcgtagtaaggctttatgacgccagcgcaccagctcggtgaggctcaaggcccaaagctctgacggcggccagtgaaaaatggcggcaatatccgccatcaggtcgtcaacttccagtttcgggtcgagcgttacgccccctgtttcggcgacaaaaaaccaatcaccttgcccgccagtgccactaaatccggcaattctaagcggctgcattctgcggtggtcagtgtcggtgtggtgatacggggtagcaccacaatcagcgcatccacatcagaatgagcgacatccgaaagccgcaccccgcgcagcgccccggcattggggcggtaaacttcgatttcagtaatcagggtatcgccacgctttagcggggtttccagtaccaccacattctcgttaacctcggcggtggtttcagttttaacagtgagttttttcatggtttttccaattcagtcagtaaggggccagcgggttaacactggccgtcaggggttagcggccaatggccttgcgttgcgcttccagcaggtctacgccgttaaccatttcaatcaggttaaccacgtcaatttccattaccaccttgccgtcaatggtcagcttgtagtaggtgcactgggtcgataccttggtttcggtgtcttccccttgcttggattcgccgccatcaatctctttatgacggccacggatctcaacttctaccgctgtcacttcgccggtatcgtcacgctgataagcgcccgcaaagcgcagcggaaccccgtcaactttaggcgttccccattgctgcaacaccagctcgtcgaggccgcccatcgaccactccatggatagcgcatcgtcatccagacccaaatcaatcggcgcaacgccattcatcccaccgccccggtagttctccagcttgcgagtgagtttcggcagggtgatggcggacacgatccccatgtaatcccggccatcgttaaacaggttcatcaatttcagcttacgtggcagtgccataagtcagttttccttagctgttgacggctgcggcaaagttcaccagatatttatcggtgatacgctggcgcagggttaaatcttccagtggtggcactggggtgtagtcgtaatcgataaacagcttgcccgctttcagggtgtctttatcgttggcgctgtcgtcataccagcaagcgccgtcaataatcagcccggcggatttcatttcgcggaatttggcgttgatgctgccaatcatgtctttgaccagcgtcgggtgcatcgggcggtctatcgcccacaactgcgcctcggccatggtgtcggccagaatctgcgcggtgcgggtgtagttctcaaaggcaaacagtggatcatcagaacaggtacgcgaaccccaaaacttgaagccgtctttacggatcaacgtcgttacacaggctttgttaagtaagtcagcgtcagtgccaacggtctgtaaatcccagtagacgctggcagatataccggtcacgccatttacgccgacgttagacagggttttatgccagccggtatcggtatcaatcttggcgcgcagaccgagggcgcgggcggtggcataagcaatatctgtgctgttggcggtggtgttccagctcaggaagtccggccaaatcaacatcaactcgcgttggctgaaattgtcacggtacaagatagcttcggagagggttttgcaaccgtaggcgctgatataggcaaaggcgcgcaactgctggcagatactccccagtgcggtggatacttcctgattatccagccccggcacaccaagaatacgcgggcgaacaccggtgacagactgcgcatctaacagcgctttcatgccagtgtagcggccgttctcgtctgcgccgccgatgatattagaggtggtttcggcctcatctttaccggtagccactcgcaccacaatggtgactgggcgcgactgttcagcaatcgccagcaatgacgcggccagcgtgccttttttaccggctttaccggcagcggcgcgcacatcagtaatcagtaccggggtattgagggggaatgcggttgcgtcagcatcgtcgctggtgcagaccatgccaacaatggcggtggaaatagtggaaatgacacgcgtcccctcgttgatttcgagaacgcggacgccgtgatggtaatcacccatggggtaactctccgttggttaagggtgagagtatggtgacggcttagtaagcgcgaggcattagatgggggatgtgtgggcgatggcacaacaaaagccccctgaatcggaggctgaaaagaaatgtcaggcagtgactggcggccactctggcaccacatagccattattcaccgcctcggtcagtagccagcgtgatttatccggctcgccaatcaccggtaattctatcaacggccagcctgccagcgtcggccactgtttgaaggctaagcgggtggtaattagctcactgtgctggtcttccgtcagtggtacatcgtcaatagaatagtcgctgaccatcatgggatcggtggcagcaataaaggcatcccgataatgtcgggcacgggcggctaactcatcctcggtagggacataaacgggaatacccccccaaaccggctggccttgctttccggctattctggttttaccggccggcgaagcacaggcaaaaaatgtctgataagtctcgtccgtgatttgaaccgcatcgtccggccaagtttgcgcagcttgatattccgtttttaacgactctggataagcggcattattcgtcgggctgtagaaataattcatttaaatctccttagtagccaatcactcgccacataactctttgcgctgtagggatgttttccccgtatttcttgctcagtgggatcgctgcccatgttgctgctaacatatccgatgcgagagtttttcctattatcgaaatatcggtgatgccacgtagtgtcacgctcatatttaaaactttattagggaacgctattgggaaaaaagcgtcagcataaaaaaactggtcatttgatctggaaaagggtgattctccccattgctcaatgagtccgtccggtcgtttcatccagccggttgcggcggctgaactggcaaagctcgacatatccgggatttgagtagccgctgttcctacctcacgctttgccgcaccttttaaatccaaatttttgagcgtctccgcaacagcgatagggcctagcgctttaatttcagatagtgagttttcaatctgcaagtactggtcatgagggttagcgctgcgaacgtgatcggctaatgccgttaccgctgcattagcggcggccttaaccgctctcggcgtcgccgcgtcggtttcactgttgctgtcggtggcattgctcagtgcgacaaagcctttttcgcttaacgtcgcatcgggatgatgacgggatttctcatgctcagccagtacgttatccgcgtactgcttaacttcaatcaccttatcatcgacatatttacgtgtagccagcaccactgatgggtcgattttcagcgtgacagcagccgcgctactgacaattaaaatcatccgaatggtttgggtgcgcccgctgccctcttgcagttgtggtttataggtttcggcacagttggcaatggcaaccaaatcaccgtctttatccagcaagccaatctcccggatccaccatccgccctcagtctcagggataacctgttcagcaataatctgactggtgttaatcgggtcaatggtcaacatattcagagcagcgcggcgctgctcattcatcagtttggtttgtgccgggctaggggttggcagggttccgccgccatccccgaccgccatttgggtaatttctaagcgggtgccgagcgcggtggcgttcgccagcttggccgcgccgatgttggtcagtaaagcaaagaatctcgctgtcatgggttcactctcaggtcatcgataatgtggattgcggcactggcgtaaccctcgccggtcacggttatagtttcaggtaaatacgggtatacggtcagctcatcaccgctgtaactacctgcggcgacatacagcgggccgctactgtcgagattgatagacaggccgactaagtggcggctgcatggcttggcgtcgtctatcagccgctcaagctcttgatacatttcttcggtaatgccggtttccaatacaccaacatcgaggcgaaaggtgccgggggtctcgttggtcttccaccactcaatcactttgatgagatagcccagcggctcaaccacccggcggattgcgccaatggtgcctttgtgtttgtggacgtactgcgaggacttcaccaccgcgcgcttggtggtttccggccatttatcatcccagcggtcaaccgaccacgcccacgccagataaggcagcagggataacgggcaagtgtcggcgttccagagctgccgaatgggtaccggggtattctctagctcggcgcaggcgcgcgcggcggccacttccagcaccgacgaaccaacaggcaataaacggtcagtcatccgtacccccgacagtgatgctgctgccggtgcaccaagccgcttgggttttatccagcaccacatcagccaggggagcattaattaccacccgctggacaccctcaacatgcagtgcggcatagagcgccgacagacgaatgtcgcgaccaaggcggcgctgtgcggtcacaaaggcggtcagtttcttctctgccgcaatgcgcaccggttcagcctccggccccggatgcagatagagcaccgcgtcaatctcataatcttcaatgtgggcggattgcactgtcacccggtcagccactggccgcgtattctcatcattcaacgcggcctcaaccacggccagcagttcggctgaggcttcgccgttgccctcacgcgataacaccgtgaccgtgacacaggcgggtgtcggactgattgccgaggcatcagcgacccggccgtcagcacttttggcgtgatattcatacgcaccggttggcccggcgacactcaagccctcaaaggcttgcgggatacgcacccggaaatcactgtcagattccatcaccgcctcaatgggtggaatggcggcggggtcagctgggataatcaccagccgctcaacgttgttatttgcgccgagctggtctaaatcgctaccgacggcataggccaccatcaccgcgcgggccgcatcattgacgcgctgacgtaatatcacttcgcggtaggcgttttcctgtagcaacttgaccagcggctcagattctagcgacaacgtgcgggccacggcggcgcgctgttcttccgggtaaagagatatcagcgtggctttgcgctcggccagcagggtttcatagtccagttcttccaccacaaacggcgggggtaacaggctcaggtcaatggttgccatagggttagctcacgggaatggttaaagagagaggtgccgcgctatcggtgcgggtgccggtgatatcaaccaccatttttccgtcaaaggtggtttcaaaggtgataccagtcagcttgaccctcggctcccagcgcaaaatggcactgtaactggcggccataatttgcagtctcaaggccggattttgcggctggtcaatcagctccgatagcagcgaaccataagcgcggcgcatcacccgcgaaccgacaggggtaatcagaatgtaagtatcccgcttaaacggcccattcacttttagagatcttccgacatactgatgatgtcacctgaggagatccttatgcgcaagatccgatttaccgagcaccagatcatcgccgtactgaagtccgtcgaagcgggtaggaccgtcaaagatgtgtgccgcgaggctgctatttccgaagccagctattacaattggaaggcgaaatatggcgggatggaagccgctgatatcaaaaaaatcaaagatctagaagacgagaatcgccgtctgaagcagatgtttgccgacctgagtctggaatgccgtgcgctgaaagacgtcatcgaaaaaaagctttaaaaccagcgataaagcgtgagctcgtcaactatctgaccacgcagtttacgatgagcatacgccaggcatgcaggacgttatcgctgagcaggacggtgtttcgttatcaaccgaatacacgacgtgatgaaccggtgatccagaggctgactgaggcggctgaacgctatccccgctatggatttaagaagctttttcaggtgcttcgcaggcagggatacgcctggaaccacaaacgcatacaccggatttactgtctgctaaaactgaattttcgtcgtaaagggaaacaacgcctgccggtgcgtaatccggcgccgctggccacgccggaagccctcaaccaaagctggtcgattgattttatgcacgacgcgctgacatgtggccgacgttttcggactttcaacgtcgtggatgattttaaccgcgaggctctggctatcgaaattgacctgaatattccggcgcagcgcattgtgcgggtgctggacagaatagcggcaaaccgtggctatccgctgaagatgcggatggataacgggccggaattgatatcactggcgctggcacaatgggctgaagaccatggcgtgatgctggaatttatcaagcccggcaaaccaacacagaacgcgtttatcgaacggtttaaccgaacgtaccggaccgaaatactggatttttatctgttcagaacactgaatgaagcacgggaaataacggagcgctggctgaatgaatacaacagtgagcggcctcatgaatccctgaataatctgacgccggaagaatatcggctgatggctgagaaaccggaaatctcaaaaagtgtgtggaactaaagctgggatacttacaagaatatctgctattgactggctgatatggtcagcgtcggtaatggtctgcccggcggtgcggttcatgccgagataggtggcagtggtcatttaattccctccgtataatccccaccacgcaagacgccgccgtggtcatggtcatcaaccaccacaccattggatgagaacttgccgccggaatgttcaatattgccgctcatctggccgcctttcttcacgttcaacgtgccggtggtcaggttgttggtacattccacttcgggtgtatccagcaggattttgaccaaggcagcacaggtgatagtgggggcagtggcatttatcgattcactggcattgataaccgccgttttgatgccatcagcctgcaactcgccgctctcaggttcatagtgcaacgtggcaccgtcaggaaaggcgatatacaggccatccgccgaggccgacggcggcgggaagtcatcagagaaaatgcccggcagcacaaaggcggtatccagctcgccgccgagggacaatatcaacacctgctccccctcagacggtgcccaccatgatcgcgattgaccggcgcgcagtgtcagccagttaagccagccggtggtattgtcccccgtcgccacacggcacagggcttggtcgagatcgacctcggccaccgtaccaatacggatcaggttgcgcagcaggcgcagaatttcagtaagttgggtttgtgtgttcatagatgaagcatgtcttttttataaacacgcttcaattagatgttgttctgctgtctatggcacaaaaatatatatctattaaataaatttaattattttttatcgttaattcaacttcatgatatttttccgaaaataatgaactagaaccagagttaagtgtttcacaagtaagaacacctgccttaagaagcaataatggcattgtccctatgtaataataaaaatcagcagcctttttattattataaagcaacactgtcatatctttattatcttcatcaaactctaaatgcctattaaggacggcttctaaactgctatgtgcttcagtgcatagttttgaatatattgagtcgtactcatctttcaatcctgccattgtgaacttttcagctatggttgttttgccatcaactctttgaactattttctttagacttcttatttcgttcttattttttttataaattaaacaaaagctatccatttccaataatgacttagtgtatttattgccttttttggaactccgcatcaatctctcttctctttcgtgaaattccaatataagcaatttaaagtattcttcattgttatgaatatttataacatcaacataacactctagaaaagttctaaaaatagagtatgggccggtgaaattattagtttccaaaagtgtgatcatcgaccttgttaactcaatcatagatgagaatatgcctatggctaatactgacttgatagacttcttattaaacgatatttctctaatgttattttgagaaaatgtaagagactcttttagagtgtccattggattacctttttcacccatattttaaattatattagcagaaataacatattgttagactattatttaccgatgtaacttagtacagccatttccacaatgtctatatcttgctgactgaaaccgagcaacggccgctcgtcatactgcacatctttgctgtgcacgttcggacggtcacgcaggccaaaatggtgcactgccgccatccgttccacgcgcccggcaaactcaaccaccgcctcatcagggctactgttggctttcatatagcgggcggtgcgcaacttggcgaacatttcccgtttaatgcggccttttggcttacgcaatggttgagatttacgcgccgcatacagggagccatcaggcgcttgctggcgtttaatgcgttgctgctggctggcccgcaggcgtttggcaactgtcaccgccagcgctttgcgggctttgggtgtcagactggcaatcagcccggccagtgcatcatcaaagggtttcagcgtattcatttaatccgctcaccgtggaaataaatttcagttggacgaggaagtacgcccgacaatgctggctcaggggcatggttaacatgcaatgcgccgtccagttctttcacaatcacccgctcagtcagttgcaagtcgatacggatatcacttaacacatcgctcatcacatcaaccttatgaataaagccggtgcggcgtttttcttctgttgccatgatgtccggttgatgttcccgcaaccatgccagtatcggcacaaagagataatcaacatcatcggggaaatcctcaataaacagcgtcagcgtatattgattttcaaaagacagcgacggggccagtgttgagacaatgcgcccgccatcaacaaacattttcagccgctccgggttagtctggaacagttgcagactgtcggttaaggcttggcgtaacagtttgggttttaacatggtgttgttcctgacactgtttaacagcttccacttgcagcccgcaggccaccagtgcggtttctaattggcgaatgtcggcacttaaatcaccgttaaccgccggtgtgctgcccggcagcgggcaactgctcaccgtcggacagccaacgtaaataatcgttggggttggcgaacgcggggcgctggtgcagccggataacgccagcaggcaaagcagtagcgaaccaatcacgcaagactttattttcattgagtaacctttgaattctctgttcacgagataatgacaaggtgctggcgtggctcagtgattgccgtaatgcccgctcattgtctgcctgttgccgggcctcatcttgcaggcgggtgatcgcgttgtcccggctctcaattccggtggataaagtgccaatcaccagtttggcgctgtctaactcttttttaaggttatgggcgtgccacgccagcacccccatcatcaaaacccataacagaagtaatgtgcgcatatcataccccgctcaggcagtgtgtttgctcggtggtacgtcgacgctctaaccctttggttttcacgccgttgacgtagacccagcgcggcaactgattgcaggcgctgcgccagtcgcccttgttgacaaaaaaggccagcgtcgagcgacaggccgcccccgtacccacgttaaaggcgaacgacaccacggcgtcatacaccggttgcggcatggcaaccggcatacacactgccacagcccgttcgacccgctgcacgtcagcaaccagattgaccgccacctgtcgctcactgataacgctgcccggcttaaccccggccgtgtgaccgatgccatttgtccagacgttggcgctgcactgataggcgttgagctggcagccctcataatcggcgatcagttttagcccggcgggcgatgtgttgagcgtctggtaatttggcaaggtggcggccagcgccagaatcgccccgaccagacagcgcttaacgattgagttcatcgaacacctcccgcctgatagccaactcttttagcaagaaatagctcttacgccggtagtaccagttgataaaacaggtcgccgcagcggccaccgccgccacataaaacgcgatatcttgcggactcagtgcgccaataaacgccagtaccagcgccaatacataggctaccgcagagctaaatttctccattttcaatcccataattgaacggtttcacgttgggccgccggggccatgtcgggcaacgccaccggataaccatgcggcagaatggcccccagttccgacagccccggattcgcgtcatagacttgctccagcacatcttgtgtgcgcccgtaatagcgccagcacaatgcgtcgagcgtgtcgccttgcaacgcgttgacctgcatcagataaggccaataatgttgtgaggcttaccggcaatgttgcgaatactaatccgcgcatcacgccacaactcatcaaccgtactttcaatggcttccgcacgtttatcaccgcgcgcgctggcgtcatagccgcgataacgctcggccaacagtgcagccgtaatggcacagaccgcccgctggtactcggccaactggatgctttcgccgtccagttgctcggcctgcacctcggccagtgttttaaagcctgccgtcatctggtcacggcggtactcaaacagttcagcgttaacctcggcaatagcgcctttgatggtgaagcgcagtcgctcggcggtgacggttccctcaaggcgcaacagctcgcgcagttttatcgggtcaaccgcaggccagaaaaaggtattttcaatcaccggttcggccgttttgtcaggccgtggcgcggggataacaacagtggtcatggcaacctcaatatcagaatgggtgggcggtggacgacggcgttaacaaggtaaaccctgttgcggccatcgtgccgcccggctcggggagcgttcggtttagcggctggcggcgttctttaacttcacggccagtcgctcaatgtctttcttgacgccacaaccggtatgcagttggagtgcgcggtgaaggtggctcagggccagttcgccccggtcactgtcacgcagtacataaccggtcattttgtgcagttttgcccgcacctggtcgggcatgtcttcgtcttccatcagctcaatggtttgcagcagatggtcaacatcaaccggcttaccggtggcataggctcgcccggcagactcggccacttcctcggcaatcaggtaagcggtagaacgagtaaaacggtctgttggcactaactgataacgcagagcataacgggcgatatccagtgcgccggggatatccccggcatccagacgccaaatcatgatggtcattaaaatggcgtcctgcgcgcctttcccctcactcaatacacccgacacccacggcagatagtccggcaataactgccgcttcagctcggctttacgctcgtttgaacgcacctgtttcagcttgcgtttatcttcattgagcttgagcaacatcagctcgtagccggtggcatgacgtaacgggttatcccgtagctgtgaggcggcaatagccgactgttggataaagtggcggcgcgcaggactggtcatggcttatttaccctcgtcggtaacggtaggtgcggaggctgttttcaccgcttcaaccagtgcatcagcaagacgatcaaagttggatttgtccgctgcttcggtgtcttcttttttcggcggcgataaaatctcgatattttccaccagacagccgcaggcgtaatcctccaccacataatcctgtttaatggattcatagttttcgatgcggtcacgcttggcgttctcatcgatatggcggcggtgcgagtcttccagccagtaaatagacaggttatcgaggcgggtgatcatgaatgcgttagccgggaagaatggcacacggatagccggtaaattgccgatccgcttctggctgataatcaggtcagcggcgagggtttcgctgttttcctgctctttattgacgatggggaaatacttatcctgcatcaactgacggccagtgataaccaccagttcagggtcttcctgatgccattccgcaatcatgttattcgtggcgtccatcaccagcgcgtccagattgacgtaatcaccgccatggccgacacgaattttttccgacactaccgcgccatcgtcaccgatgattttactcattacgcgggttggggcattggtgcggtatttttgcaaccagcccggcgcaatatcctgcaacatcgggttgagtgcacggtttgaggtcttggcacggtgggtgccattgaagcccgccatgatacggtcaagtgcctgacgcttgataatcgcgtcgcgcaagcgggtctggaagtcctgataacgcgcccacaggtcgagggtgttatagcgaatgtggaaatcgtagttcacctgctcacagaaatacttctcactgtccagccctgcaaactcagcggtttcgcgctcatcgccaccgtcagtatcagtattgctggcaattgacccggtaacactcaggcccactttttcagcggtcagctcggcgacgggcacaatattgatgcggctcagaaactctgaggactcttgaacgcgggtcatgatggtttgcgtgacggagggttcaacgttgaattttttattcaaatcgccggttgcgaccccgttcagttcggcttgacgggtcagataggcattaaatttaaaacgggttgctgggcgcataataatcctgattcagttaaataatgtaatggtgaaataacaacgtgaccgcacaatgggcggcctgtggccctgattagcagtcagtcagcacgtcggcttgaccactgacaccagtggattccgggcgcttggtctggttaaagttttcagtgatagacagtttgttttcgagggacgtaaccccttgttttcccttttcgatgctctttttcagctccaccacgttgtcagtcagttgtttctcaatggcggcaaagcgggcttcaatggtttccccctgttcctgcacatgcactgccacggcattcaccgcctcatgcacatcattaaaacgggcatcatcggttgcctgtttacgactgaatactgacttcaccatgctgagtaaggtgacacccggctcggccacgtcttcaaactccaattgcacttcaactgccgcagagaaaaagttatctgggtgagacttacgggcggccagtgggttgtgtttggctttggcgctgaattccagcatttcagtaccgaggctggcggggtcatcggtcacggccagcccgaccagataggctttaccggtattagcaaagttcgggcgaatttccatggaggtatagattttctgtagggctttgttcatctgcaccaaatcatcggttgggctgatttgggcgaacaacgcacgcttaccgttcaggatggaatcgtcttcaatggtttctgctttaagtgctgatacatcgccataacggcggaaggggctgtcagggaaataacttttcaaatgctccaaattgatacggcaaccgtagacgcgtggatcaaatgactcggccatctggttgatatcgtcagcgtcaatcactcgtccgtcgcaggtatcaccttcaacgccgatacgaaaatacttagagactttcttagccatgagcggctccatttaatgtgggttgtttggtacggggcttagtttccagactgagggaggcggcaacaacgaaagcccgttgtgacggggctggcacaacagcgaggacgcgcagagggtcgggctggtcgcgtagcctaatggcatgaatacgataccgagcaccatcatcagcgacccacggcgacaggcggccttgctttactggcagggcttttctgtgcgccagattgcggacacgctggccctgaaatcgccgactgtgcagagctggaagaagcgcgacgggtgggacgccattgcgcccatttcccgcgtggaaaccagcatggaagcgcggttgattcagctcatcatgaaagacgccaaagaggggcgggactttaaagagattgacctgttaggccgccagattgaacggctggcgcgggttaaccgctacagccagaccggcagcgaagctgatttaaatccgaacgtagcgaaccgcaacaaaggggagcgcaaaaccccggataaaaacctgttcggtgaatccgctattgaaaagctggagtcaatttttcacgaaaatatctttgattatcagcgcaactggtttgaggccggactcactcaccgcatccgcaatattctgaaatcgcgccagattggggcaaccttcttctttgcccgcgaagcgctgctggatgccatcacgacaggacgtaaccagatattcctatccgccagtaaggcacaggcgcatgtgttcaaaagctacattatcgactttgcccgcatggttgacgttgacctgaaaggcgacccgatggtgctgccgaacggggcgcgcctgttcttcctcggcactaacgtgcgcaccgcgcagagctacaccggcaatctctatcttgatgagtatttttggatccccaaatttcaggaactgcgcaaagtcgccagcggcatgtcattgcacaaaaaatggcgtaccacctatttctccacaccgtcgagtctggcccacagcgcctatccgttctggtctggtgagttgttcaataaaggccgccgcaataaatccgaccatatccaactggatttaagccacagccatttggcccgtggtgcgttgtgtgctgatggtcagtggcggcagattgtcacggttgaagatgctctggcgggcggttgtaacctgtttgaccttaaccagctctcactggaatacggcccgtcagaatatcaaaacctgctgatgtgcgagtttgtggacgatcaagcgtcggtgttcccgttcgccgagttgcaggcttgcatggtggacagtctggaagagtgggaagactacaacccgtattcgttgcggccgtttgggcatcgcccggtgtggattggttacgacccgtcagaggccaacggcggtgacagtgccgggtgtgcggtgattgcgccgccaatggtgccgggcggcaagttccgcgtgttggaacgccaccagtggaaagggatggattttgaggcgcaggccaagcatatcgaagagttgacgcataagtattgtgtggagtacatcggtattgatgcgactaccgtcggtcaaggcgttttccagttggtgcgccagttcttcccggccgcaagggaaatcaaatatacccctgaaatcaaaaccgccatggtgctgaaagccaagcacaccattaataacggccgtctggaatatgacaccggccacaccgatatcacccagtcatttatggccattcgcaaaaccatgaccgccagcggcaaaagttcgacttatgttgccagccgcagcgaagaagccagccacgccgatgtggcgtgggcgattatgcacgccctgttaaatgaaccccttaccgcgacatatggcggtcacagccctaacttcttggagttttacggatgagtaagcgcaaaggccgcaaggcattaagccgacctgtcaccaatcacaccgccagccaacagcagccggtggaggcgttcacctttggcgaaccctccgccgtgctcgacaagcgggaaatactggattacatcgaatgcaccagtaacggtaaatggtatgacccacctatcagctttgacgggttggcgcgcagcttccgggcggcggtgcatcacagctcaccgctgtatgtgaaacgcaacatactggcaagcacatttacccctcatgcaatgctcagtcagcaggcatttagccgctatgcactggattatctggtgtttggcaatgcgtttttagaggtgcgccgtaaccaactgggcgcaccactgcgcctcgaccccagtccggccaagtacacccgccgtggattagaaaaagattgctattggtttgtccagaactggaaagatgaacacctgttcgccgccgggagcgtttttcacctgatagaaccggatatcaatcaggagctttacggtttgccggaatacctcagtggcttaaattcggcttggctcaatgaagccgccacgctgtttcgccgcaagtattaccagaacggcgctcacgcgggatacatcctgtatatgactgatgcggcgcaaagtagcagcgatattgaggcaatgcgtaaagcgatgcgcgacaccaaagggctaggcaatttccgcaacctgtttatgtacgcgcctaatggcaaaaaagacggtatccagattttaccgttgagcgaagtcgccaccaaagatgacttttttaatatcaagaacgccactcgcgacgacctgctcagtgtgcaccgggtgccaccgcagatgatggggattattcccaacaataccggcggtttcggtgacgtggcgaaagcctcacaagtgtttgtccgtaacgagttaacgccgttgcaagaacgattgaaagaggtgaatgactggataggggaagaggtgatccggttcaagccttatgaactgataagcgaggattaatatgggacgtaaagcgccaacaccaccgccatataaccccggcgatattgtgaagaggcccgcgccaccgcctcagccaccccaaaaatgcgaaacgaaacgagtaataattatggaaactcaaactaaccagaaaatcacagtgcaacgggctgttgatattcttaatcaagcgttgtcacttgacccggattgtattactgcgctggtatcgcatcgaatagagtgtaacgcgacgttagcccatgactctgaggtgatgtgtggtatgtctgaaggcaaatacatgactggcgcgcttggcgttatcaactcactggttacagacggctttatcgctgcactgtatacagatgaaaaaaagctggcagcgtttcaagtttgcaaatagttaattgatatttttgaatatcatagccgccgaaccgggcggctttttcatgcccgaaaagtagcaatcccaacacctcgcgccatacaccaccagacgcccgtcacgccctcgtaacccatgaacacgcattgattcccaacccaaccgaacgcagcaccacggcccgcccaagacctataaataagggtatcaaaaccctttgcgcgcaatgctatccccgccacgcctgcgcgctttacaggtcgcttttcatgcacttgcatgaggcattgagaacagcactgggactggcagagacaggaaaaaggaggaagaggatcataatgcaaaataatgcagagtcatgcacaaatcttcttgaacagtgggccactcaaagtggcccaatcaatactaggattgcaagcgaatttgttgctgtatctggattggttgtaaagtttggtagcgttggcgaatgttgttataaagctcaggtgtatcatgagcttttaaagttacaatcaacacataaggtaaattaggtaaatcttcaaccgctgttggcattcccccttctcgcccataatagataacatcaaaacaagggtcattaatgatatctttcttaaaggttttttcactatgcaaagtagtttcccatttatgggcatctcctctttgctcttgttcatcggcatagatactttttaaattgaacagagggaaagtccctccctgattattttgattttttctaaaggtaacaactagcccactacgggtataattaattggatgctcagcatcaaccggcgtagtaaaacaaaatgtagcttttaaagttacatctccactgactggaatatcaggaaaaggaattgatgctctaaggtgctgtgacggttttaattcgccttgataaataaccttaacctcatcatcaccacagtaaataatatctctgatatcatgggggaatttaccccaacctacttcacttctattataaccattatttcgtgagtgatgaataagtaatgctttcgcagttaaaggagtaatatcatattgtaaacttgcagatagaccaatcgcctgacgtagaacgaggggcgaagcaaaacttgttcctgctgttttcactaaaccgttagtgaaagggctatatagcgtaaaaggctcttccgctgaacctccaaaagcaacaccatctggcttcacataaccgggactacgaccgggaccaatacaactatagctacttctctcccaattatccgaaagtgaagttgcagcaccgacagctaaagcatttacaagatctgatggaggttgaattctatttaatccacctgttttctctccatcatttccaactgcaacagtacaaagagtttttcctgtggcaaaatactgctctaatgtggaagtccatacatgaacatcatcatcgtcgacaggtagcctagggccaaggctgagatttatatattggtagtcattggagtctaatactttttttattctcaataagacatcgaaaagatcactatcttgtccattgatagaattatctaatactctataatgatcgatttttgaatatggtataggcaattggttttggccatcagctacagccccaaaaagaatagtagaagtaacatcttgtccatggcttaatagacttccactggttttttgttccgctgtaaacgtatgctctgaaacccacctgtcaaaatctgaacatcctataccaccatcgaaaatagcaactttaatatcattattaattgcattatcatcaggaagttctaattgactattcagaacagttgttctagtaaatacgggattgttaattctaagtcccggtaaatctctaattgttcttaaaaatgaaaactctgcaacctctctagcaattttagagttagctaagattggtagaaaagtaagccccttaattgaaataactttatcttctttaaccgtagcaccacaaagtgatgcatatcggataaatgaattgagaatatcatcctcttcagccggggtatgcaacgctacttcaatagccctttcctgagcagattggtcgatgtttttaatcttgtcattagcatcaaatatttttatctcctctaaagatattacttcatctttctgccctttatttaaagtccctctatcaagagaattataaaaatcagaaaatgacttcgtcgtaccggcaacatatatacaagcagtgttatattcttctttgttcttatttttaacttgttttcgtggtgatatagtcactgatttactaccaatacttctcagtgaaaactgcttaagtatttttacaggaaaatatgactttgcaagaaaagcgggatgcaaagttattttcgcaacagcttcaccatttggttttgtagcttcgggcatgttgtttacgaaatctactagagacctcaaattctgcattataaatggcctattctcctcatatgtataaggtttatttttagggccgttaccgcttttaatatgcacatcaccagttagtgtctcaccataccccaagagcaagtttttgttattcatttcttaatccttaattctgaataatctttctaatgattggccgtgaaattgatagttcagcggatatttgtcgctgagacattccctttttatgcataagtaaaataaactcatctagagactcgccgtcaaacaactcctcaaatattgctttattcacagggatattttctaagattgcattacgttttgcttgttttagggagcgttctatcactgcgaaagagcgcccttttaactcaccactaattttttcagctatagcagttggtatatcattttttactaaaaactcgtgaattaactcttctgttggatattcaaagtttataactctatcaaatctacgccagacagccgggtctaataattcaccatgattcgttgctgcaactaaaatagatgtatgaggccactcatcaatagcttggagtaaaacagtaactaatctttttaattcaccgacatcagaggaatcatcacgtttttttgcaatagaatcaaattcatcaagcaataaaacacatgggaatgaacgagcatattctaaaacagctctgatattattccctgttttccctagaaaactactcatcacacttgctaagtctaatgttagtaatggcaaaccaagtttgtttgcaagccatttagcggctaaagtcttcccaacgcccggaggtccacccatcaaaagagaacgggatggcaaaagcccattatcaattaattgatcttttttctcccactcagtgataaagcgcaacaaactagtcgtaatattcgcaggccatagaggcttaacagttagttgtactgggtaagtttcaaccaatagcttttgtcttgtatcagcatctacaggagttggtaacttacttaagctcccaccacgcaccaaattcatcggcatgctatttttaataagaatatcatttagctctgatgccaactcaggtgagtctttttttagctttcgaatcatgagccgtaagcgcatctcaagatcgtcgcgtttaccctgcaatgcatccgtcatcacttcaacaaacgcatccttagtgatgtttatcatgtaccactccgaaagaaaaacgtaccaaacattatgaatgatataccaacaagtaccatatttacattaattttaaccaatcataagaaaaatgataccattaggtatcttgttgaagccactttgggaattttacattaaaagataaaaatggacttaccaactgccagaaatctctgactaaacagtagacagttctaattttgtcctatgccatctaccacatcagaaatcatacaaatgcagtatttttatctttcacttgtatagcctctgccctcacttctttaacaagttcagcaatccaaaccaaagcaatctcacgatcacggttttgactctcactaccagtagtaagccgcgctatcagatcgattctttcgagtaagactatttcttctaatgaatctggcacctcatccctccgtcacacatataactgtgtttatatacagtatactatgcactttttaagaaaacttctatataaatatatggttttacttgagtaaaaaatcttggattaaaaagcatcctgttgaacaacaacccttttatgcataaaaacagcgaacacagcgcgtcacgctacatatttaattttcagtgtgacgcgtcacaacgatttaactgcactaattaataatctgttgatacctttggtctgccaacacgccgcctcaccccgtaaacaacacccattcggatcacccggcaaggtatcgccacatttgccacaacgttgtttatccagttcagccagttgctcttttagtcgctggttatcttgtcgaatcaggagcgcgatatattccggtaaatcgtaggctggccggaacagacgccgtgtggccatgccctcgattagcatcgcgtactcttctggctccagtcgggcgcggatctcattgataccggcagatttatcacgctggcgctgtgcctgtttgcgggtagttgcggcggttttagtcatggttttcctcacaggtagattaatcatcgaattccggccagtcggacagggccggatactgaataacaatgtcgccgaacgtcatttttgccccacgggctaacgattccagctcccatggttggacgctgatatcttttagctgcaggtcatagcggattttgggaatgcgctggcgttcttcgcgggttaaacgggccgatggcgcaataaggcggcccttggtggggttataactgcgttgcatcttgctaatgcgtggctgattttctttcattcgcgccacaatcgccctcacggcggcagtgtcggtgaagtcaataactgcatccggtgggtattccatcgccatcacaggcgttttagcctgcccgttggggtcatttggcgcttgggtgtttccacctaacccacagttattgacaggactccgaggcgcgccagaggcgctttttaaagtcaaaggctcaacgtcaacggcacccgaaacgatgcgccattgggttatgcgggtttcatgaacacggtcagcacctaaatgcggcgcgtagataccgacgactttctgtacttcctcgtcataggcgttgagttcatcggcgacgcgcttggctaaacggacagtctgatttccgcaattggtgccaccttgcgccgtgatgtaggcagcaaaatcaccctcgtcagccgcatggcgcacagcctcaacggtttcgtcgaaagtctcggctagactaatagaacgaatacggcggcactcgcgataaacgcccatggagggcagaccaatcgggcggaattgagggatacgccacgttgccgcccacgctgtcaccgccgcagcggagtcagttagaagctcgccggtttcatggtcacgttcaccctcaagcgcatagccgtcgatatttttggcaatgtatttagcgatgtagccagcggccccgcctttgttcatgtgcttgcattcaaagcggtatttagcggctccgcgctcgtcactgtcttctttcaacgcataccggcgcatgacgtcgataatctgttggcgctggcgacgctcacaaaacagcatcatgtgccagtgcggggttccgtcgtggtgcggctcaaccacccgcattccgtagacgcttaatttattgtctttaaaggcggtacgcattttgctccaaatgttgcagagataacgctgtccgtctttgggggaataggcctcatcgtcccacttgtggttaagctggactttctcgttatcccctttaccgataacgcgggtcgggtgatattttgacggggtggtgatggtcaggaacatgccgacgtgcttttgattggcagcatatttttcagtaaaagcaatggtgttcattagctccatacggcgaatttctggattagaaatactcgccatcaccttatcaatcaggtcgatgcgctcgccggtttcaatgttttctaactggcagcttttgagatattccaaattagactgacgacgagcgaacacctcacggatggcctgcttactggcataagacgacgccgacatatctcggctaacattaccgacagcaatcaataatgcttcccgccagcacatacgttgggctttaagtttccgctcccaccattcgggattaaccagtcgtgacagactggcgatagcagacgtgatatctaaccggcctttccggtatttgcgccagtgcatcggcgtgatattaaaagcgcgcgccattttggcaatatcgccgtatatccgtacctgtgtatcagcctgcaataaaacagacctgtcaccctgattggccttaatgcattcatcacaatgatggttgtacgccaccattaactcatcacctattttgcgggcaaagcggcgcagctctttatcatgcatacccgctaggctggcataggttggtgcatcagtggaaaagctcattgacgcactgaggcgcataacatttttactattgaccacctgaatacgcggccagatacgctggtcaaaaacaaacaccagccatttattagcatcgtttagccctttattggctaacaggtattcatagcgagaaatgaactggatacgcaggaagtgaggcaaattattgatattggctaaaacagcttgcccctgaatcagttgttcacgggtaagcggtcttgctggtgcaagggtttggcgtggtttgctgccggggtaggcataggcaggaacagcagcgccgctgcccggataaggcaacggcgctgctggggcaatgcgaccgcgcatattattagtgctggtcataagactgagtgattatgtgttcagcgatttggttaagcagctccgccgcctctacaccgttcaattctcggtttagaatttgattagcaatctcatccaaacgaaatgaaaccagcgcggcctgattctttctttcatccatgcgcgcttcatttagcattagctccactgattcaactgtcgtcattgttactgtactctcactgcccggcttggctgggtctacacccacccatatattttgtgctggatgagtgttattcaaaatgggatatctccatcaaaagaataaacatcgatagagtcgatgccatcaaatgaaagcatgacaaaattaggcgcagcaaaatcacatagagtaatatctgtaacttctaccacgactttacgcccggtatatatatctcttttaaaatcccactcagccaaaagcaaataatcaccaatagagtaatatcggtcatttttccgtaactcagctttttttctcccatcaattacagcttgataatactcaggcataatttctaattgatgaattataggtgatgctgtacattccttttcttttccccctgttattttattgttattttttgacttcacataaattaggtttgctgcagtcatagcacttgataaatgcccccttaacttaacctcattcacttccctatctatagggcaggtagttctcttaagatacgaaaaaacatcaccagcacgctcaatttcttccagaacggtatatatatctgtctttttcatttctataaccttattttaggtaatggaaaccccggcgagtaaaacgccatatatttcgattttggttaattaataatattcagtacgcagtcatcattactaataaatgacggtaacgaacgagtgaactcaattaaataatttaatgcttcaacaacactctctctttctgttggactcaattctgaaaacttcatattcacatgtcgtttttttaaaccagcatgaaagcaaattgttttacgcaaatgcgcaggcgacttatcaaaagcctcttgagcaatattctttctattacggaaatgtgtttcttttaattcagcaatacgagtaatacccgtcattcttaacttttcagattccgttaattgcaacatataacccccaattaacgcccgaacagacggcgtaatattggtgtcttctttgcagaggacagttcttgtaaaagcgccttttgattacttcccggcttccagcgctggccgctcttcaactccagcacaccgttaccgaaatggcgcaggtttaccgggctttgctgttttaacaatggggcaatagtaataatcataaagacacctcaactcaaaccggcgacagcactcaatccgctaataacatcaacggttgaagcaagcgcaggggttgactgaatacgacattgtaccgtcaggccaattaatgacagatggcgaatcgctgtattgaccgtatccagcagtgacgatttacgggaagcggtcttatgatcgccttgaacagcagcggcggcaatcaagccaacggcagcggtagcatgtagagcataagttgggatattaccgggacaggcttcattgactggcaccgatggcatgcaattgatttgtgccaacatggcatcaatcaagctggcgtcttctgttgcgtcagtgatcgcaagcaattcagtaaccgtaagatggtgtggctgttccgggttcagcttgttccgcaacgtttgcgcattcatatccaactgtttcgccaactgcgtcaaattgtgacgtgtcggaaactggcggcatacattgtcaaagtgcggatgtttagaaacagaaaaatcaaacatgtcacatccttaaaattcacttaaagtgaatacagattatcaatgatgagctgaaaacgagcatgaccgaatgcattgcgaagttgttcttctttccaacgcgcatagtaaatacgaatcgggccacctgctctcttacatcccttgcgaatcattcgcttttcaattggtacgcgagggttatcgccagtcgtccaacggtaagcggtacgttttgaaacaccctcaagttttgcgaacatttctaagctcactacaggagcaggaatttttataattgcgatttcagaagccatggtgcatgattccctatttgccaaagtttgtaagtgatgcgcctctgtttgccaacaccagccatcaattacgtaggtttagccaaaatatatctccatattgggagatagtaaataggttttgtcaaaatgagaattgattctttaggatggagcaacgtagatgtattggatagagtctgtttggcatatggattttctcagaaaattcaattagctaaccacttcgatatcgcgtctagttcgctgtctaatcgatacacccgtggagctatctcttacgactttgcagcacactgcgcacttgaaacgggggcaagccttagatggttattgaccggagaagggcaacaatttgaaggtaagtcttcatcatcggatacaaagagaatagaaaaattcacattatgtgaagaaatactcaaaagtgatggttatctgagtattgatgttcagctttttgggaagcctttatctgatggaattgctgttcgcactgatggaaaacttcactttatcgataaagcagcatcgttatcggacggtttgtggttggttgatattgatgagtctattagcattcgtgaactaacaaagctaccgggcaaaaaattacatgttgccggggggaaagtgccgtttgaatgcgggattgatgagatcaaattgatagggcgcgttacgggtatttacagcgaggttaactaatggctgtgcgtaagaaccctgctggcggctggatatgtgaactgtatcctaacggatcaaatggcaaacgcatcagaaagaagtttgccacaaaaggtgaagcactagcgtttgaacaatacaccgttcaaaacccgtggcaggaagaaaaagaagaaagacgcacattaaaagagctgattgacgcatggtatagcgctcacggcatcacacttaaagatggcctcagacgccagcaagcaatgcatcacgcttttgactgtatgggcgaacctcttgcgagagatttcgatgcgcaaatgttttcccgttacagggagaaaagattaaaaggtgagcacgcccgctcaaacagggtaaaggtggtatcaccccgtacactaaatcttgagctggcttatttccgagcggtatttaacgagcttaatcgactcggtgagtggaaaggtgaaaaccctttgaaaaatatgcgacctttccgcaccgaagaaatggaaatggcctggctaactcaagaccagattgcattgctgctcggtgagtgcaagcggcatgaccatccagatttagaaaccgtagtgagaatatgcctcgcgactggcgcgcgctggtctgaggccgagagtttaagaaaaagccagctcgcgaaatataaaatcacctacaccaacacaaaaggcagaaaaaaccgcaccgttcccatcagccaagagctttatgactctctgcctgatgataaaaaaggtcggttgtttagtgaatgttatggtgcgttccggtctgcattggaaagaacagacatcgaattaccggcaggacaacttacccacgttttgcgccacaccttcgctagtcattttatgatgaatgggggcaatatattagtactgcaaagaatacttggtcatacagacataaaaatgactatgcgatatgcacatttcgctcctgaacatcttgaagatgctaaactattaaatccattggtaaaaaaatgacaacactcgaaaaaataattcaatttatcaaagagcacaaatttctttctgtaatggtagctctaattactaccttcattttggcgatccctctcatactctatattacgaaattcaatgcttcactatccactgaccccaacaaatgggctgcatttggaacgtatgttggaggcgtatatgggccaatagcaacaataattagcattgccgtattaatccttaccgttgtagaaattaatcaatctaataaaattagtattgcggaagcaagaaacaataattttatcaatgagatagtcaagcttacagagatattatccaactgcctagataaaaaccctctaataatagacagaacttacttatttaaatggtttaataagcagatggtttcaaaatttgaaaaaaatcaccctgcagatgaatatgatatttggaaagaatgtataaaaaagttcactaatgatgaactctctcttttcgaaaatgaagttgcaatcacagaagagatactattaagaatccattttatagtggatgaagatctaaaagctagagctaggggtatctttaaagggataatcactaacaatgaacgattctggctcgaatgctacatacgtaggtttaacttccctttggttcattttttgtccctatggaactccttcagcatagttcctaaaacgttaagtgatatgatcatagacaaggaacttgaagagtttattcaggaatacagtggcgatatagtggcgatagatatggctaacaaacggtaataaatggcaaatagatgcaaactatgtcaatgataaataacgcaaaccattgattttcggttgttactgtaggaactcataatcgcttggtcactggttcaagtccagtaggggccaccaaattttagctgttaaatcagtatattaagccacttcttcgagagtggcttttttgttttaggggatttttttgtttttggggctaatgcccccaaagtgccgccagccaccagatctgcggttcgcgacgacagtttggtgctttacctattaaccggctttacctatttacctatttacctatttacctatttacctatttacctatttacctatttacctattttatcggcttaaccggcgatctctggtttttacaatttagtcttgcaggcctatctctcgttacgaaccttctgcgcggtagcacttctcatacagtttgccctggacgtaataccagagttcgttatccgaaataacttgtattgcctccggctgcccgctccccaacacatggtaataaatgctgccgtcttctttcttggcatagaaaatttcgtgtcccggacgctgtagcgataacaggttggcgtccctcgtcatctcaaggtgctcaaccttgctgtcaaacatctgattttcgcatacataatcactggccgatgcctggaaaacacataacgacatcgcagccatacccaacttccacaacattatatttctccctaacacggataggcttcctgagataaaagctatcacaatgataaaaaataataacctaaacgaaagctttaatataaatacctacatttaataatacatcttgcttatatctcatctgccaaacacccttaaatcagattttttcccattttttgtcctatatttatacgtgatattaacctgtgcaatggagccctgtgtttgggagataatatgaaaaagaaaatcttggttgttgtcaccagcgttgagaaataccctactcttgagcgcgcaaccggcctgtggcttggtgaagcagtgcattttgtgaaaaaactgcagaatgctggctatgaaattgactatgtcagccccaaaggcggctacacgccaattgacccccacagcctgagcatggcagataaaaccgattgggagtggtatcaaaacaaggactttatgaataagctcggcgcaacgctgaagccagaagaaattaaaccggaagattatgacgttatttattatgccggcggccacggcgtcgtgtgggacttcccggataataagccgctgcaagagatcagccgtaaaatatatgaaaatggcggcattgtctcgtcagtatgtcacggtgccgttggcctgctgaatattaaactgtcagacggttctctgctgattaaagataaaaccgtcaccggcttcagtaatgaagaagaaaagctggctgagctggataaatatgtcccgtatttgaccgaaactgaaatggttaaacgcggcgctcagtaccaaaaagcagacaaagcatgggacgctttcgccgtagctgatcgtcgggtgattaccggtcagaatccagcctctggcggtgcggttgccgacgaagtgctgaaagctctaggcaaataagtacaactcgtgcggtttgatccgccgtgataataagccactctctgcgagtggcttattagtttctatccgctatatcattgcctcaatatcatcaattctggctcatcttaatgaaatctgaagccttaaaaacccgcttacgcgggcttatgaataatgacatcactttggataattaacttttgcagtcgttaatccgtacatcgtttttatagatacagtttgaaaccagtttgccttcttcattccagacctgcgaagcgccctcctgtttaccagcaacataatttgtcaccatctcttttttaccatccgcataccagcgttttacggcaccgttcaattcaccgtctttataaggtttttcttctttcaactggccgttggaatgccactgtttcagaacgccaacctctttatgatcgttatcccactgccattgcagggtttgcacgccctcttcattccattgacccaggctacgctgcgcgcctttaacgtaaaagtctttgctttcaaccttaccatttgggtaatagctgatagaccaaccttccagcttgccgtctgcgaatacctgttcattacgtaaggtgccatcttcgtaatagcttttcgtcggcccatgcggctgcccttttacataggggttgctgctgcgcacttttccattcgggtaatattccagattagtgccgtcaaaaacgccgccccgataactaaatttggcggataacttacccttttcgtcatagctctcatcaataccatcaaccggtttatcattatggaaagtgctggatgtcgccttgcgcccgttctcatgataaagagtggttaaaccctcacgtaagccattggcgtctaagctgctgtctacgctgactttgccattgctgaagtaggttttatagggatgaaccattttgccggaagcaaaatcttccgcatcaatataaccttcaacgtgtagtttgccggtgttgacgtcgtagacttccattttccaggccttcagcttttggtcataaggcattggcattttttgtacgtactgagcgtcagcttctcttaccggctccagttcttcactcagataaagcatgcctttagtaaccgctttaggagcaaactctgggcaagtttgagcattgcaatcgtcagcgccgtgtaccatggctacgctgccctgacagtcagccagaaacatcagcattggagtttgatcgtccatcaacgctttgagcttgcccgcaactgagccaaactctttggctggcgcgccgatagactccggcgtgatgtaggcaatattgtttccgcaggcgtgcttggaagacagcgttaaccgcagcgccgggccgctgtaatccatacttgccggtaattttgcgttggcctccatgccaacaataatcgcaggatggtgagtttccaaacgcgcagccgctggccacattaatgcgatgctcagtgccgaacccacgcaaagattccagtgtttcattgactttcagttccctctaaggtgccgtttacggctaatttaagtgccaagctgctggcatatcgaacgcaatgtccgagttactctcagcagcgctatacaggctgctaatttttatagtgctattctattcgttggcgatattcatataaccagtcaattccagataaccaaagaatagagcgcaataatgtgaattatttatgattacgatgcagaaacgcacgaatgaccaacgtgccgtgcaccgtgagcatgctcagcacgattagtgccagccagaacgcacctattacctgccagggatgttcctcgggctgcaccaataccacaggaatagcgtcttttgataagccggtagcgccaataaaggacacatgatgctcaccggcgctgcttgcctgcgaacggaaaaaagccagaatgggcagccatccccccactttctcaggtggttgcaccaacaggtcttcccgattcaatcccacaatttttaccgcatgttcactgggaacaaaggacgcgacctgtttacgcagcaccggacgtatataaatccccatggcatccgcgctttgatccaacatttcgactttatgattactggggaatgccgcaggctgctcaaacgcccccaactctgacattgccagtaggtcataccaatcgtctgattccgtgccgtaagcgtcgttaatgctgattctcaggcgatctttcatatagttacaatcaacgttggtacaagcagtgttaatcattgccaacgcctgaggaatatttgccaaaaaaccataatgggtatcatcaacatagaattcaccggtcgccagacgcgccacggtctcatccaacggaatgatcggtaacgggtgcggagcatcccaaatcaggcggctacagtctgcatagacttcgcgatacggcttttgtgagcgagtttcatcggtgacgttaatggtttcaggtaaaatcatttcacagcgcgctgtcccttccaccgtaacccgctctcccggcggcaactgagcgtcccgtaaagccgtagaagaagtaaaatgaaccggttcgctacctgcaagttgatgataacccagggcaatccgagctaaaggcgcccgccattcgctccacgccacgcccagtaccagcaacgccacaatcatgatggaaacgtgatggcgccagaaccttggcctaacgttattcattccctgatcgatagcccgaccattgaaacgtagaacggtaaaatcttcggtactgagatgaacctcaacctcaccggcaggtgccgttacagcgccccaggattcagggaataccagcagcaggtggtctcccagccatagcaaaccctcctgctcatacactttccctcgcataatgttcaccgcgccaggaaggccgcgacgacgcagcagcaggaaatacccgagcggcagaaggcacgcagcagccccccaccaggcgatgatccactcggtggtcaatgtgctggccagtaatgctcctaaacctagcagaatcagaaacgtaggaaaaatacgccagccggaacctttgcgcagaataaattcactttcggtttctttgcgctgcctgattagcttgattggctcgctggaagaatcttctgcaatcgttcccggcgtacccttggcccagttctcccgcacggtttcagcgccgataagacgctccagtccctcttcaatcctgaaactgttgttgagggaaacaaccaacccaatgttgccgataaaaatcacttctgcccgattatggggctgtagaaacgcatctgggtcaaagggtaaatacacctcgacgccacccagagtttcatgctttacctgcccgccgccgctcaaaccgtggctggaatactcaccttcgataatccgcacgtcatgattattcagatcagacagatttggcggctggcgaaatggatccaatagcagcagcttatccgtcaccgggccgaaagttatctctatcgcggcgagttccgcgctggtcaggctgcgcacgacaggaagttgacgagcctgccgcagtttaaagcgatcgcgaaaacgcctaccgccatagatcagaacagaaataagggaaatagcgcagataaccaacggcaaaaactcgttaaaactcataatcctttacgactccagcttccatgctcaataaaatgttatcggctacacagaaaaatctaaaaccggtatcggcgcattaccgaaacacttgaaccttttctatcaatggatagagaggaaatattctataagcggctaatttaaccgacacatttatttacacggcgcatattatcagttcctgacaataccgaaagttatccttttctttggttctcatcttttattccttattttttataaggataaacaagtcttttcagccctatctgcgctttcaccacctttatgttcaaaaaaacgataacctgcggcgctccttaaaaccgcatattcatgacggctatcacattcgctacagagaaatttcccaagccagaccacagcgtctagattgaaataaaaatctcatccgaccacttgcccgagaagctgcgaggaggggaaataataataacaatttggtggtatctaatatcaccaaagcactcgatggagactgcaatgatcgcttatcccaacctgctcgccccgctggacctcggctttactacactaaaaaaccgcgttctgatgggctccatgcataccgggctggaagaactacccgatggacctgaacgtatggctcggttttatgccgaacgggcagctgctggcgttggcctaatcgtgaccggcggtatcgcgcccaataaaaaaggggtggtttatcaaggcggttcgatgctgagcgatgaaggtcaggtggctcatcatcaaattgtcaccgatgccgttcatcaggctggagggaaaatagcgctgcaaattcttcacgctggacgctatagctaccaaaaacagcccgtagctccttctgccctgcaagcgccaatcaatcctttttcacctcaggcacttactacggaagaaattgaacagaccatcgcggattttgctcgctgcgcgcggttggctcagctggcgggctatgatggcgtcgaaatcatgggctcagaaggttatctgattaatcagttcctcgccgctcgcaccaatcaacgtaccgatgaatggggcggaagttttgaaaaacggatgcgttttgccgtggaaattgtgcaggcagtgcgtcaggcaaccggtgagaaatttatactgatctatcggttatccatgctggatctggtagatgaaggctcagactggcatgaaatagaacaactggcgctggcaattgaacaagccggagccactctgattaacaccggtattggctggcatgaagcccggattccgaccatcgccaccatggtgccacgcgccggatttagctgggtaacgcgcaagttaatgggcaaagtcacgatcccattgatcaccaccaatcgcattaacgatccggcggtcgcagaaaaagtgctggccgacggctgtgccgatatggtttccatggcacgccctttcctcgccgatccggaatttgtccgaaaagcggcagaaaaccgagcggacgaaatcaatacctgtatcggctgcaatcaggcctgtctggatcagatatttgaaggcaagctgacctcttgtctggttaatcctcgcgcctgccgcgaaagcgagatgccgatacaagtgacacccgtacccaagcgcctggccgttattggctctggccctgccggtctggcttttgcgactaccgcagccagccgcgggcatcaggtgaccttatatgacgcagccgaccgcatcggtgggcaattcaatatcgcccgacagattcccggcaaagaagaatttaacgaaactttgcgttatttccggcgacagcttgaaattcaaggcgtgaatacgatgctagggaagcatattcaggctgcggaactggcagagtttgacgaagttattctggcctgtggcattgtgccacgcttacccgttattgagggaatcgagcacccgaaggttctcacttatctcgatgtattgcgtgataaaaaaccggttggtcaacgagtggctattatcggcgctggcggtatcggctttgatacggcggaatacctcagtcaatccggggaatcgaccagcctgaacagtgaggctttcaacgccgaatggggaattgaccaaagcttgaatcaccgcggaggtttggctcctcaaggccccgaactatcgccttctccacgccaaattttcctgttgcaacgtaaagcgagcaaagtgggcgaaggattgggaaaaaccaccggttggattcaccgcaccagcctgaccatgcgtggcgtaaaaatgctgaatggcgtgagctatgaccggattgatgatgaaggtttacacatgacccgcggcgagcaatcgacctgtctgccggtggataacgtgattatttgtgccggacaggagccacgcagagaactgtatcaaccgctgctggatatggggaaaaaggtgcatttaatcggtggagcagacgtggctgccgagttggatgcacggcgcgccatcgatcagggcacgcgattggctttagctatctaatattgcggatcaaaaaggggagcctcagctcccctctgcacgattaaaaatcgctgtaagacatatccaggctgcctgagccgccgccctcggaacgagagctggagctggttttcaccgctttcaatacgacaaatttctgattggaatcgatggtttcacagttaccaaacaggcgattcagcttatggtagtagtccaaatgacggttaccaacaatcattagctcaccaccggttttcaggcaacgtttcgcatcacaaaacatctgccaggcgacgtgatcactgacggtatgttgttgatggaaaggaggattacagaagaccatctgcaaactttcacgttctacgccagcaagaccgtggctcaccataaactcgcagcgcgccagatcctgcggcaaattgcgctcaatattcaaacggctggaagccaccgccatataagactcatccacgaacagcatttctgcatccggattctgctcaacggcaatcagcccgaccacgccgttcccacagcccagatcggccatttttccactcagattgtacggcaggttttccataaagaaacgcgcgccgatatccagattgttgcgagagaaaacgttagcgtgattatgaattacataatcagtgccgcccagcttccaatcggtggtttcaggtgtttctgtcagcggtaaatcagccacttcacagtgaatcagtcgcgcttttttccatgccaggctggttttggttgggcctaaaatacgctcaaacagctgcaaagtagaattgtgtacgtcacgggctttggcgccagcaataataatggtatcgggagccaccacgcgacgcagcgcctgaagttgatgttccagtaatgccaacgctttaggaatcttaatcacaaccaacgccggagcctcaggtaaggcatccatactgctcagcaaagtcaccgcgttatcatccagacggttcaaatgcagattgtgcgcggtacccaactggctcatataagaatcgctgacgctatacgggttggacgcgtgtaatgcacaggccaaagcaccaaattgatcgttgaacagcagcaccgggcgtccgccaactttactgatgtcgatgttttttaacagatattcatctgctgcttcccacgcctgtaggttgctggaatcttcctgctgtgggaaacgttcaagtcttaggctttgcgtttccagatcgagttggctcatcgccgctcctgaatgataaatttgggctgtttatcccctaaaaagggcgatcagtaaattgttttttcgtgaataagggttttattgatactgggctaaccagaggggaattcttcttatagttatattattgatgcatagagatatatttaaataacgaataaacctcaaaaaattctacagtttatcccatttttagttctctaaggatattgcagctatcaaatcgaaataggcaaatatacaatccgccaacttattacaatcggaaaggttatatagtcaataccgataatacattattaatgaaacaaattaaagaactaattaatgggaaactgcctgtgcaattttctatgcttatccagcaatataaccacggaaggtactcactcatggatctattcagcgctttgccctacacaatcccgccaagttcgcgtttataccaaactcaacactctaaagcctttcatcgtaattggtgtgccagaggcattgccattgcgctgttggcaatgagtagtgctaacgccagcacgacttcttgggcttctctgccgaccttcgagccacctagcgcactgagcattcagcctcaggctgtttacttgtcagcagctactccccattggcctactgcaactccgcgctggcctgctgctgctccccgttggcctgccagtcgaatcgatactcctgtcaatgatgttgtggaaatcatcacttctggtgttgaacatattcatgagttcctgatcaaagaattcaacaatgaactttatctacaatttaagattgcaggtgctctatcctctataacgccacttaatcatttatctcctgcgttaggaattaatgttactgatgatcttattacagaagaaaacatttataaccatatcaatagctcggccagtcccaaatctattgatgcatcttcagatgaagatatgaatcaaaacaaaacaaccgaagtagcggttaataccccccctcagcatgttgatgtcgttcccaacgacgtaatacacccggttgtgattaatccaaatttgaataacgatatctggacaatagatgatgagtccatcattgaaagtttatctttgagcaataactcaaaaatagtcattttgcccagcagcgaactggggagttatattttttacatgaacgagtaccaatctgataatagccaaaatgaaatacacttccacacacaaattggtaataacgaatacccaggtggatatctttggattaatagtgacagcgcaggcacaacttttgtcactatccataatcaccgagtcaacgaatcaataaataaacacgatcaggatattcaactcatagaggtttcaggcgaaataaaaggcaactttattcagcgtggtcgcgttatatccggcgcttatgattatcgattgttacgcgacgggccagctggcaaaagctggtatctcaccaataaggtctccctggatcctaaagtggcaaactctaccgcacgggtgtaccgcccagaagcggcaggttatatagccaaccagatagccgctaacaaactctttatcagcgatattcacgatcgctttaatcaaaccgattatgtagatcctctcagcggccagaaaatgacgcccccaatgtggatgaaaacatccgcaggtattcatcgttttaaggattcatcgggccagttggccagtaaatccacatattcctctattcagttaggcgatatcttgaaccaatggtcaaccaacgataacgatgttggatactttggtattactggcggatatggaaaggccaatgctaatagcgaatcgaatattaccggttatcgcgcccattccaacactcacggatataacttggggctttacaccacatggtttgccgatcgctccactaagctaggtgcctatattgatattctggggcaatatagctggtttaaaaatagcgtcgaaacccagggagaaggtaatgaatcatataaaagtaagggatttactacctctatagaaactggttttaaacacccactgattgatcaggaacagtttggtttatttatccaacctaaagctcaggccgtttggcagggaattaaagctaaaaatcatgttgatgcttatggcacgctgatttcacctaaagacaaccaccattggatgacaaacgtcggcttacgcagttatatgcagatcaactctggcacgctgtcggagaaacgcacactgtcagtcaaaccttatctggagacaaactggatccataatagcaaagctgcgggaatcattatggataacgcaaaaattgatcgttcgggtggaaagcatatcgcagaagttaagttaggtattgaaggcatctttaataaagatcttaacatctggggtaatttaggccatcaaatgggcaaacaaggctactctgacaccaatgcgggtcttggcatgaaataccaattctaaacggcctccagtgccgggcgcgcactcaaaacgctatcccggccttggtgcatttttgtttaatttagctgaaaacggtactatcggctgattacttccaacgtaaagccatcatcgttaaaatcctaacggtgaggcttatcagccagagcatactcagatgcaggaattgacctatctgcaaggttatcccgaacagttgcaaacccaggttcgtcagttaatcaccgaacaacgtttggggcaggttcttcgcagccgttatcctcaaccgcatgattacaatacggataagtcactttatcagtacaccatggatctgaagaaccagtacctgcgtaacgctcaaccgctgagcaaagtggcttacgacagcaaaatccaagtaatgaaacacgcattggggctacataccgccatttcacggattcagggagggaaattaaaagccaaggctgaaattcgcgtagcgacggtatttaaaaatgcgcctgagcctttcctgaaaatgattgtggtgcatgaattggcgcacttaaaagaaaaagagcacaacaaagccttttatagcctgtgttgtcacatggaaccgcaatatcatcagttagagttcgatacccggctttatctgacccaattatctctgtttggcgatatttactaaccgcttaattgacctaacggcatcaataaattctcatcgtcagccctttttctggcggcggttcaatgactgacacagtacacagatacggagcttttatgattcgctttgctgttattggcacaaactggattaccgaacggtttattgatgccgcccacgcaagtggcaagatgtcgttggctgcggtctactcacgtcaattggagcaggcgcaaaatttcggcaataaatttggggtcagcgcctgttttcattctctggaacacctagcccagagcaacgaggtagatgcggtttatatcgccagccccaactctctgcactattcccaagccttgctgttactcagtcataaaaagcacgtaatttgcgaaaaatctctggcctctaatctggccgaggttgaagccttaattgcctgcgccaaaaaatatcaggtcatactcttcgaagcgtttaaaactgcctatttgcctaattttattcagctgcaaaatgcgttgcccaagttaggccagttacgcaaagcctttatcaatttttgccagtattcctctcgctatcagcgttatttaaatggcgaaaatcctaataccttcaatcccgctttttctaacggctcgattatggatatcggctattactgtctggcaagcgccatcgcgctatggggagaacctcagagcgtacaggctagcgccactctgctgcccagcggagtcgacgctcacggtacggtctgcctgaattacggtgaattcgacgtcgtattattccattccaaagtcagccaatctcatattcctagcgaaattcagggcgaagacggcacgctagttattgaaagaatctctgagtgccacagcatcacctatactccaagaggtcaggagatacaggatctgacgctaccgcagtatgaaaataatatgaggtatgaagctgaagccttcgccgatttgattgctaaaaatcaggttgagcatccaggtttagcgctttcagtcagcaccgcgcgccttcaaactgaaattcgtcgccagactggcgtagttttccctgcggattcgcagcaagcatcatcattaaaatgaataggtgtgattgaccaacgccctcttttgaattaattttggtgctgcaaaggggagtaacttcattgccggtttgccgtcattacggtgcgaaagcactcggttaccgggcaacctcatcatgtagaagcaattaaatcgcttttacatcatcagggttgtaagtgagaccttgccggaaggcgaggtttgcttgcagctcagacatagcggctggcgtcttccgacgttggccgttttgtttttttatgaggtttactctgatgatgaactccgttggtacgcccgtactttgggtcggttttgccgttgtagtcgcgattatgctcgccgttgatcttttccttcagggccgtcgcggctctcaaaccatgacgctacgtcaggccgccgcctggtcgttggtatgggtgagcctggctatgctgtttaacgccggtttctggtggtatctgagcgaaagcgtagggcgcgaaattgcggataagcaggcgctcgctttcctgaccggctatctgattgaaaaagccttagcggtcgataatgtctttgtctggctgatgctattcagctattttgccgttcctgccaatctacagcgacgcatcctgatctacggcgtacttggggcaatcgtgctgcgaacggcaatgatcttcgcaggtagctggctggtttcgcaatttagctggattctttatctgttcggtgccttcctgttattcaccggcctgaaaatggcatttggcaaagaggataacagccccattggtgataaacccttagtgcgctggattcgcaatcacttacgcatgactgacgaactccacggcgaacgtttcgtcattcgcaaaaatggtctgttgtacgcgacacctttggtgctggtgctgattctggttgagctgagcgacgtcatttttgccgtcgacagcattccagcaatctttgccatcaccaccgatccctttattgtgctgacttctaacctgttcgcgattctcggcctgcgcgccatgtatttcctgctagcaaacgtggcggagcgcttctcgctattgaaatacggtctggcagcgattctggtgtttatcggaatcaaaatgatgatcatcgatctgttccatattcctatcggcatctctcttggcgtagttgccggtattctagccctcactttactagtgaatgcctgggtgaatcaccgcgccgatcaaaatacaccacactaactatgtgactatctgcctgataatctattacacggggtgtctgtcaccccgtatttatttggcagataccactaatcgccaaatgttatcttgatcacacatatgtaaacaaaatgttatgcaaagtgatcaacattatatttccctaattgtttctttccagcctattccattcccttatactaaccctgcaaacacacttggttacaggtttgaagaaaaagtacccggtcaggttccggccgaggtatgaagcctgtacaacgtcattcaacacagcgacattcagttcactgggaagaggtaaattgatatttatggaaaacaaaaaatcagggctatttcactacttaagccacggaagtctggttaaacagatattggtgggtttggttgccggtatcattctggcaagcgtttcacaatcagccgctgtcgcggtaggcctgttaggcaccttgtttgtcggcgcattgaaggccgtcgccccggtattagtattgatgctggtaatggcttctatcgcaaatcataagcagggtcagaaaaccagtattcgccctatcctgttcctgtacttgttaggaaccttctcggcggccctgattgccgtcgccgtgagtttcatgttcccttcgacgctggtattggcaaccaataatgccgatatctcccctccgggcggcattgttgaagtattacgtgggctattactgagcatcgttgccaacccgattcatgcgctattgaacggcaattacatcggtattctggcttgggcggtcggtttaggctttgctctgcgtcatggctcagagactaccaagtctttgatttctgatatgtctcacgccgttaccttcgtggtacgagtggtgattcgctttgctcctctgggtatttttggtctggtagcttctactctggcagaaactggcttcggcgtattactgggctatgtgcaactgctggtcgtattgatcggctgtatgcttctggtagcactggtggttaacccactgattgttttctggaaaattcgccgtaatccttacccactggtgtttgcctgcctgcgtgaaagcggtgtaaccgcattctttacccgtagctctgcggccaacattccagtgaacatggaactttgtaaaaagctgaatctgaacgaagatacctattcagtttccattccactgggtgccaccatcaatatggccggcgcggcaattaccatcaccgtgttgacgctggcagcggtacatacgttgggtattgcggttgatttgccgacggcattattgctcagcgtagtcgcggctgtgtgcgcctgtggcgcttccggtgtggctggtggttcgttgctgttgattccgctagcctgcggtttattcggtattccaaatgaaatcgccatgcaggtagttgctgtaggctttatcattggcgtattgcaggattcggcagaaaccgcgctgaactcctctaccgatgtgctgtttaccgccgcagcctgtcaggctgacgatgccaaactggctaatccagacccgctggcaacgcgttaaatctcaagattctcacttatccaaagggtggcaaaagccgccctttttatcctttcttttcgaccagaaaaggatcgatgccctgcaattgcaagcgacggaagcggatgatattaaagccgttaatcagcaggaaactcccttcaatcagcgatccgccaatcgaacccagccagatattatgaattacccaacaggcggttgagcaccacataatacagcgcgtggttaagccgtgagtgcggaacagcgcccaagtactggctacggtgccaattatcggcaaaagctctactacgtgatgcattcgccacaaacctaacgttagtgtcagaatgataaacacaaccatcactatgctgctacgagtcttggtcgagatcagggtgcgtagagcgttaagcaatgcactgctgcctgctgcactggctcccatcagaaagaaatggccaccgatgatggcgctataagccgaaagttgcagtttgaaacgtcgttcatcccggttgaaaaacatggtaataccgacaaaaaatgccaatacgccaacagcttgggcaaaccaatagaacgtcatggtggggtattcctggtataggggagtccctatctcttctggagtcgaacatagctaaaacgacgcgcttaccgctaatcggggcccacggtaagcgcgcgaaaaatgaaatgtcgttttattttaatggttaaccatactagttacaaggtgactccgcttttaaaaatagctaattcacggaaatcattggcttcattgcgcgccggtttgccattggcaatggcgacgatcagttcgacgaactcttccagtaaaacatccattgaagtccctttgattagttttcccgcatcaaagtcgatccagtgaggttttttcgccgccaactcgctgttggtagccagtttcaccgtaggcacgaaaccaccataaggcgtacctcgaccggtgctgaatagcaccatatgacagcctgcccccgccagcgcactggttgccaccgcatcattccccggagcgctgagcaagttcagccccggacgttgcaggcgctcgccgtacttcagcacgtcgaccactttgctttgccctgctttttgggtgcagcccaacgatttttcttccagcgtagtaatgccgccagccttattacccggtgacggattttcgtaaattggctgatgatgagcgatgaaatactgtttaaaatcattcaccatgctaacagtcttttcaaaggtagactcatcgcgacaacggctcatcaaaatgcgttctgcaccaaacatttctggtacttcagtcaaaaccgaagtgccaccgttggcaatcacataatcggagaaacgccccaagagtgggttagccgtgataccggacaaaccgtccgaaccaccgcattccaggccaaatttcagttcgctgagttgacccggcacacgcgggtcgctgcgcattacctgatatagttctcgcagtcgttccaagccagcttccacttcgtcgtcctgctgctggcacaccataaagcgaacccgctcattgtccacttctcccagcgtagtttggaaaacgtcgacctgattgttctcgcagcctaaacctataactaataccgcaccggcattaggatggcgcaccatattttgcagcatggttcgggtattttcgtgatcctgaccaagctgtgaacagccgaacggatggctaaacaaatgcaccccgtcaatgccttccgcctcgttggtttccttcagaaaacgctgttggatctgacgcgcgataccgttaacgcagccaacggttggaatgatccacaattcgttacgaatgcccacgtcgccatttttgcgacgatagatccgaacttctcgatcggccatttgcaccggcagatcgctaaattctggctgatattggtattcatccaagtcacttaaattggttttagcgttttgagaatgaatatgttcaccggtttgaatcgggctaagtgcatgacctatcggcaaaccatatttcacaatcatttgatccggctggattaaagttagcgcaaacttatgcccgcgggtcactggctgcgccagcgtgattgcatcgccatcaattttgatgacttctccctgcgccagatcctgtagagcaacggctacattatccagtgggtgaatttttatcgtcttttgcatagaaaacctttagctgtaagccgcaaccgctgctctcattccacgatccaggatagtttgcagttgctctgtcacctgttcggccaactggggtactgcagttaaatcctgcccccaatgattcgcatcagacaaaacggtctgaaccaatgcggcgggagtcgtttcgtattgcttcacactgctccataagcgagagtaggtttccagccagtgagcgtcgtcttgcaacggataggattctccttgacgttccccgcgataaaaggcgagcaacgcggctaatgcaaaggttaaacgcggcggcagcttgcccttttgctgctggtaagccagcagctgaggcaaaatgcgggtacggaatttggtcataccgttcaacgcaatagacaataactggtgctgaatgaaagggttacggaaacggcttaataccgcctgcgagaaggaaagcagttcatcctcaggtaaatccaaaaccggaacgatttcttcaatcatggttttttccacgaactgactgatttcagaatcattcatggtttgcccaacggtatccagaccggccagataagcgataggcaccagcgctgtgtgagcaccgttcaaaatggcgactttacgctctttatacggcttgatgtcatccacgatgcacacattcagatccagttgatccagacgcaactcttttgccaaccactgtggcccttgaataacaaagagatagaagtattccgccgtatcgaggaagctgtcctgatagcccaattcagcctgtaaagcggtcacttcatcgcggggataaccggtcacaatccgatccaccaacgttgagcaaaaagtattattttctgttagccaacgggtaaatccagacggtaactgccaatgctccgcatagcgcagcaccagttcccgcaaggcttcgccgttataatcgattaattcacagggcaacaacacccagcctttatctgccgcgccgtcaaaatgcgtatagcgctcaaataataagcgagtcagcttagctggaaatgacgccggtggcgcatcatccggtttatcttgctcattccaggcgataccggcttcggtcgtattggaaaaaacaaagcgaatattagcatcgcgagccagtgccagatactcgtcgaattgacgatagatattgatctcccgattcaccgaacggatcagccgagattcccgcaccgcttccccctgctcattcagaccgcgaatgaccgtggtatacaggccatcctgcgtactcaaggacggaggaaaatccgtatctattggccggatcactacgatcccagcgttaagatcggtatgttcgttcaaaaggtccagttgccaatcgacaaaggcgcgcaggaaattgccttcgccaaattgaataactttgtcagggtaactgcggccgggaaaatcacgacggttcagggttagcatgttgatctacctcataacgcgttccgccatagacaggccacgggcgataaaccggcatcatatgcacagcccgtcgctttccgtcccgcagacagcgttgaattaagcaaaagtttgaaaggcgggaggccgattggcgctcccgcttggcacattacaattcgatagtgaaatactgtttggcgttatcgaaacagatgtttttcaccatcgcacccagcagttcaatgtctgccggtgcttcaccacctgccacccagcggccaatcatctgacacagtattcggcggaaatattcatgacgtgtataagagaggaagctgcggctatcggtcagcataccgacaaagcggcttagcaaacccagctgcgccagttgggtcatttggcgctgcataccgtctttttgatcgttgaaccaccagccggaaccgaactgcattttccctgcggcaccttcgccctggaaattgccgaccatagtgccaatgacttcgttatcgcgtggattcaggcagtacaggatcgttttcggtagcgcattacgcagaccttgcgcatccagcaaacgggaaagcggctgagccagcggctggtcattaatcgagtcaaaaccgatatctgggccaaccagattgaacatgcgactgttgttattacgcagcgcaccgatgtgatattgctgaacccattcacgacgatgatattcaccagataaaaatagcaacacagcggttttaaactgagccacttcttccagcgttggctgagttcccgtcagacgacgagctagaataccgtcgagcgtcgtttcgtctgcttcaccatagaccaccacgtccaacgcatggtcagagactttacagccgtgagcggcaaagtgatccatacgtttgttcaatgcgtcgcacaggtcggagaatttacttatagacgtatctgccgcagcttccagcagcttcaggtaatcgcgaaaaccggcggcttcaatattgaaggctttatccggacgccaacttggcaacactttgatgttaaagctgccatccgcggcgatagctttgtggtggcgcagatcgtcaataggatcatcggtggtgccgaccattttgacattcatctgttgcatgataccgcgcgcagagaaagccggttgagccaacagctcattgccacgttgccagatttcttccgatgttttcggcgaaagcagtttgccggtaataccgaaaggacgacgtaattccagatgagtccagtgatacagaggattgccaattgtgtgagggacggttgcggcccaagcttcgaatttttcccgatcgctggcatcgccagtacagaatcgttcggcaacgccgttggtacgcatagcgcgccatttatagtgatcgcccttcagccagatgtcatacaggttcttaaaacgatagtcttctgcgatttgttccggtggtaaatggcagtgatagtcataaatcggctgatcttttgcataatcgtgatacagacgacgggcaaactcggtatccagcaaaaaatcttcggttaaaaactgcgacatattggcttcctcacatggctacatcgtagagcactgttttctgttatcgcgaagttatcacaccaattccacttaccgtccagcactttttacaagacagtgatcgcaaaaacctaacaaaatgaacaaatactcaacattttctattatttagtcccttgcagcactaaggctgacgagttctattattccctaattgaaaagtggtttttgtgatgtcactcaacttttaaatctgtatgacaagttattgttgcgtcgccctgagttgtcttatggatacgcatcatgagagttcaggggaaaccaaatcgaaaaaattacaggtcgtcggtgaagggatacatcgtcagtgtcatttttctaacggcttaggaccgtggtgataccaggcatcgcaaccttaggggcatcagcttgatttaaccccctcggcgttgagagacacgatcaaaaaaggagcgtttaggtaccaccgggtgcacgggcatcgactggatggaccaaattgcgccatggactgccgccagacagcactccatagcagtaatcttagagactgggagagatttagaaatgcgtaaaattaaagggttacgctggtacatgatagccttggtcaccatgggcacgattttgggttatctgacacgtaacgccatcgccgtcgccgcacctacgcttcaagaacagctacatatcactacgcaacagtattcttatattatcgccgcttattccgccgcttacactttgatgcagccggttgcaggttacgtactggacgtcatgggaaccaaaatcggctacgccatgttcgccgttatgtgggcgatattctgtatgggtaccgcgttagccagcagttggggcggcctggccattgcccgtggtgccgtgggtgcagctgaagcagccatgatccccgcaggcttgaaagccagtagcgaatggttcccggcgaaagagcgttctattgccgttggttattttaacgtcggttcatccattggcggaatgattgctccaccgttagtggtctgggctatagtcatgcacagctggcaaatggctttcatcattaccggtgtgctcagcctgatttgggctatctgttggttaattttctataaacacccgaaagatcagaaacgactgacggatgaagaacgggactatattctcagcggtcaggaagctcaccactccacctccaactcgaaaaagatgtctgcaatgcagattatccgtaaccgccaattctggggtatagccatcccacgctttctggcagaaccggcttgggggacgttcaatgcctggattccactattcatgttcaaagcctatggctttaacctgaaagaaattgcgatgtttgcctggatgccaatgctgtttgctgaccttggctgtattctcggtggctatctgcctccgttgttccaaaaatacctgaaagtgaatctgattgtttctcgtaaattggttgtgactatgggcggtctgctaatgattgcgcctggcactatcggcctgttcactagtccttatgtcgctattgctctgctgtgtatcggtggttttgctcaccagtctctatctggcgcgctgattaccctgtcttccgatgtcttcggtcgtaacgaagtcgccactgccaacgggttaaccggcatggcagcctggactgccagtacgctgtttgctctggtggttggcgcattagcagatacgttgggcttcagcccactatttgccgcgctggcggtgttcgacgtactggcagtcatcgttatctggacggtgctgcaaaatcgccctgccgatgactcacagacagatccgatacaacaagcaccggctgagcaaaattaacccgtccggcgacgttctccaagagtgacgcactgcgcacacactagcccggcagaagcttgccgggtttgtttttctccgccctacactacctttggttaagtatatctgtgatagcaatagctagaaccaatcgggaataagtggtataacaagtccgcgagatatgccgttcgggatagcctccaagccctgacaacactgagtcataacattatctgcctcaattgatccaagagccttaatcatggaattcacagataccagacggttataccaacagttggccgcagagttaaaacgacgcatcgaagctggtgtgtatcaggttggcgataagttgcctgctgagcgctatatttcggaagaaatgaatgtcagcagaaccgtcgtccgtgaagcgattattatgctggaagtcgagggctacgtagaagtacgcaaaggctctggcatccacgtcatgtccaatcagcagaagcatttggtcatgccaagcaatgaaattgagttcgctgctgccggtccttttgagctacttcaggcgcgccagttaattgaaagcaatatcgccgagtttgcagcaacgcaaatcactcgtcaggatatagtcaaactgattgaaatacaggaacacgctcgtcaggaagatcgttttcgggattcacaatgggatttgaaattccatgtgcaggtcgctctggctacccaaaataccgcgatggccactatcgtcgagaaaatgtggagccaacgggtgcataatccgtattggatcaaactgcatgagcacattgacgataaatccattgagagctggtgcgaagatcacgatcagatcctgaaagcgttaatgcgtaaagatccttatgccagcaaactggcaatgtggcagcatctggaaaacaccaagcaaatgctgttccatgccaccactgatgatttcgaatttaacgtcgatcgttatttatttgcagaaaatccagtggttcatctggataatcttgcggccaacaatatgacgataaacagcaaagcctgagctgaatagtctccccgctactattacctacgtttttccgcaggaagaatcgaaaaataaaagggataccgcctgcaaaaattgcggtttccctcttataaccttgcattggcgggatcactctagtcagtaaatgtcgagatctgtcagcaaatgtaagcagagaagctatttcttaaaagcggtacaataaaccatcaattaacgcctatatttccctgtttcatatcctgctattttgctaaagtgactgctcttttttttcccgccactttgggagcgaaacgcgaaagatgcgctggttgttgatcctgcttattgctgtttcttgctggaccggttcggtcgccagcaagccgctattggctgggcattctgattccacgcaggacgtttcttataccgcccttcagcgcgccgcaattcaatacattaatgttgaattcattactcaaaacgtcttccgacataatgcgccattgcccgaccagctgcgtcttggcaagcggatcaaaaatttctcaattaaaaaccgtctgagcacatctaaattcaccggaacaggcaatactttatgggtaaacctgagttggcatccgtcctggttcctaacttcacgcaatgctcaggcaaaagaaatctataagcagtcccgacaaccgtcaccattacgccaatctggccgctggatgcttcattcagctgcgcagcaaaatcgcgtgggcggctggaaagagagtaatatcctgtacagcggtgcactgacttatcacgacgccgcaattctgtttccattgtcataaaaatttataagcaaaaaatagatttactgcatacgcatcaacggattggttcactttggaagtatcagcacctttatctgaaccgccgcgtgagcgcaacaaaaacaatgacgttttaggaataccagatggatatcattaaagaactcttacatgccttgtggcagcaggactacgaaacactcgctaacccttcgttggtgtgggccatttatatcctgctgtttgtcatactatttctggaaaatggcctgctgccagcagcatttttacccggcgatagcctgctgattctggtcggcgtactgattgccaaaggggcaatgagtttcccggtcacgctagtggttctgactaccgccgccagtttaggctgttgggtcagctacatacagggaagatggctgggaaataccaagatagtgcagggttggttatcccatttacctgctcactatcacacccgcgcgcataatttattccaccgccacggtttgtccgccctgctaattggccgttttttagctttcgtccggacactgttacccacaattgctggcctttctggcctgagcaacgctcgtttccagttctttaactgggtcagcggcctgctttgggtactgattctgactacattggggttcgcgttgggtaaaacgccggtattccgcaaatacgaagatgaagtcatgttcttcctaatgctgctaccgctagcgttattgtttatcggcctatttggttctctgtacgtactgtggcgtaaaaagcgcagcgtgcagggtgataaaggaaatcaggcgtgatccagcttctggctcgtttgcgccgcccacgctggcactatgcggtgctagcgttaggtatgctggtgcttgtcgcgctgtttacccccgtgatactgcatactgaaagcgccctgaaaatcagccctaatcaacaagggctgagtcttccggacggcttctacctttatcaacatctggacgaacgaggcattcggattaaaagcattacgccggaggccgatagtttggtggtaagtctggaatcaccggagcagcagaaagaagccattgaagcattgcaggctattttgccgaagggctacgtcatcgtgctgagtgaatcaaccaaacgtcatagctggctgccaaagtttggcggtgatacgcaaaaaataggctagctcaatcctctgtcgggggaaactctcccccgtccctctgatgtcatttctccccgcgtgctctgattactcttcgatatgtaaccgataggtttcgcgctgccgctaaccacgcaacaatttgaaaaatgaaagggattccccaatataacccaatagaaaacttgggcgatgttctattcagcgctatgcttaacttaagtgcggttatcgccattactgatatgtcccatttattaagcggcatggaactaagacacaccgttgtcttcaggctgcaaaaaggaagaaatattatgttgttacgccattcccttctgctggttttaccggttgttgcattctgcggcctggctcaggctgctaccgctaacggctgcgatatcaaagcgaaagaaattcagcagcagatcgattatgccaaacagcatggtaatacccagcgcgttgccgggctggaaacggctctgaaagaagtgaaatccaactgtactgaagccggtttacaggctgagcatcagcaaaaagttgctcagaaacagcagaaagttgccgagcgtcagcaagagctgaagcaggcgcaggaaaccggtgacgcaaagaaaatcgccaaaaagcagaagaagctggacgaagcccaaaccgagctaaagcaacttcaggctgaatagatattattcatcgcttttggtagtcaaaaatctggttaaaaagccattttatggtgttttttaggacgaatccgcaggcggattagcatgattttccacaggttggcctttcaaccgctcagaaaatccgctatgttagatattcttctcagttatgttaaggagttatttatatggcacaagataaaaacgctgaaaatttgcgcgccgaactcaaatcactggcagatacattggaagaagttttgcattcctcctctgataagccaaaagctgagttagataaattacgatccaaagctgagagtgccctaaaggacactcgtgagcgcctgagcgaaaccggcgacaaaattgcggctcagaccaaagaaatcgccgacaaggctgataactacgttcatgacaacccttggacaggtgttggtatcggtgccgcagttggcgtggtattgggcgttctgttgtctcgtcgctaattatggcagagcaacctcgcacacagggccccggtaaaggggtccttgataccatccatcgcatcgccactatcgtggttggcatggttgaaacccgcgttcgactggcggtaattgagctggaagaggaaaaggcaacgctgattcagttgctgataatggccggaatcactctgctattaaccgcttttggtttaatgagcctgctggtgttaatgatgtgggccgttgatcccgtctaccgctttatggctttggctatcaccaccggcgtgctgttggggctagcgttgataggtgttatctggacgctggttaaagctcgtcgttccacgtttttgggttctacccgtcaacaattggaaatcgatcgggaattattggagaaagaccagtgagccgccagttacggttagagaaggaaaagttgctgcgtcagattgaacagcaacgcctggatctggctaacagcgcggcacactggattgaagtgaccgcgccttatgatcgcggctggctcaaaattcttgaaatgcgtaagtttctggttctgggttccagtctgatcgcagtttatggcgttcgccatcccagccgaatgattcgctggtcccgcagggcgttaagcgcgtggggtaccttccgacttttccgtcgcacattttcttcccgctaaactcgcctgtcgccactgtctcagacggcgagttttattaactcattcaatttattatttattttttattctcaacccttccacttatctttatcggctaacctttttcgcactttttgttaaacccatcaatttttttgataaaaacaaacagtattacttgctaacaactttcctacctccctactaacatattattcatcaacccggtatgaagctggaaagccaacggattgccacgaaatattgccgctaatgttaagcattagcatcaacccttatttggagtaagtagtcgatgaataaattacaagataccggtctgttggttgcacgtattctgatgccaattctgtttattgttgccggttacggaaaaatgggcgatgcctatgctggaactcagcaatatatgcagatgatgggcgttcccggcttcttcttgccattgactatcttgctggaatttggcggcggtctagcgattctgtttggtttcctgacccgtactaccgctctgtttaccgcgggcttcacgttgttaaccgcgctgattttccacacaaactttgcggaaggcgtaaaccagctgatgttcatgaaaaacctgaccatcgccggtggcttcctggtgctggccgttgcaggtcctggcgcattcagtattgaccgtctgctgggcaaaaagtggtaactttcccccgcggctaatatccgacgccctatctgatggtagggcgttgttattttgtcgccttactgacgaatggattaatacggcgttgctaatccaaacttatttcgccttcctctgctctctgcgctataaaattcgtgattacctctaaatacacaggagtacccaatgggacaactagttgacggcgtttggcaagacatctggtacgacactaagtcaaccggcggccatttcaaacgtagcacctcacaattccgtcattggataacccctgatggccagcccggccctcacggccgcggcggctttaatgcggaaaaagatcgttatcatttatacgtttcccttgcctgcccttgggcgcatcgcgctttattaatgcgcagccttaaagggttagaatcccttattccggtttcagtcgtacatccattaatgttggataaaggttggacctttagcaccgacgtccctgataccaccggagattccctttaccaatcggattacctctaccagttgtatttacgtgcagaacccacttatagcggacgagtgaccgtccccatactttgggataagcagcagcaaaccatcgttagcaacgaatccgccgatatcatgcgtatttttaatagtgcatttgatggtgtaggtgccgccaagggggattattatcccgaagcgctgcgtgaggaaatcgaagaaattaacggttgggtctacgatgcggtaaataatggtgtatacaaagccggttttgccaccagccagaacgcctacgatgaagcggtaaatacgttgtttgtggcgttggataaattggaattaattctggaccagcagcgttatttaactggcaatcaactgactgaagctgatttacgtttgtggaccactttagttcgttttgatcctgtctatgtcacccactttaaatgtgataaacgccgaattagtgattatccgaacttattcggtttcctacgagatatttaccagatgccaggcattgctggcaccgttagcttgccacatattcgcaatcattattatcgtagtcatgccacgattaatccctacggtattatttccgtcgggccagaacaggatttattgtcggcccacgggcgagatgttcgttttggttcagagtaatagtctaacccaataccctgttataccttttttactcggacgggcgaccagcgcccgtctcactatattcctaaccgcgccccagtaatttaggaatttcccgcaggcaccaggacttagcctcgcccatactgtctcgccgccaggccataataatatccacttctcggctgtactccggcccaacaacccgtaagcgacccgcttcgatatctttttcgaccatttcataaggcatggtcgccacgcctaatccggccagcaacgcgcgtcgtttatcttcaatagtactgaccgttaaacgctgctgtttatccaataactgaacggtaatgaccgggcgctcgcgagcggtatctgccacggcaatacctcgatatttaacccgagtcacttccgagagcggctccggttcctgatggattggatgatctgggctggccacgtagacgctggttactttatataattttcgtgaattgatttctgaagaagcgcggaaatgcatatctggtgcgataacaatatcagcacgcccctgctccaatcgctcccaggctccggccagaacctcagtcaaaattgaaacctgcgtattggccttgagcgacagtttgtcgataagcgggaacagtttccaggcgggcgacaacgcctcactcacaattgtgatgtgtgtttcccaaccccgcgccagcgcttcagcatcggtagtcagtttatcggcagcttccaataacacccggccgcgatccagtagcatccgaccaacatttgtgaatttagtgcgatgcccggagcggtcaaatagcaccacatccagctcttcttcaagcttctgcatggtgtagctgagggccgaaggcactcgacccagttcatcagcggcagcggcaaagctgcctcgacgatcaatcgcatccattacccgcagcgcttctagcgttaacgcccgatctttggccatcagttttctcagtcaggaaatttgaatataccgaccagattaactggctaacaatcctgcgtccagacgcttaccatttgtctatcaatttataggggcaatcatcgtcatgatcacatgcagaacggcaaaacagtgcgggcaagctgactttggttggttacaggcccgctataccttttctttcggtcattatttcgatcccaaactgctgggctacgcttcattgcgagtgctcaatcaggaagttctcgcacccggcgcagcgtttcagccacgaacttatcctcaggtagatattctcaacctgatcttacagggtgaagcggagtacagagacagtttgggtaatcatgtacagggaaaagaaggcgatgttattttattttcgccgcagtctgaggtgagttacagcgagcataatttgagtggctgtaagccattaacccggattcagctgtggctgaatgcctgccctgagcaggatactgattcgagtcagcgtctagcgctaggcaatgaatcatatcgtttactggcttcgcctgatggcgatcaggggagtctgaagctgcgtcagcagatgtggattcaccatttggatatggcggcgggagatgaacatagcattcagcttcacggtcaacgggcgtatttacagtcaattcacggcaccgtagaagtggaaggttcgcagaccagcgatcttcagcgtctgacctgcggcgacggcgcctttgttcaggaagagcagcagctcaccattaaagccaaaacgccgctacgcgcgctgttaatcgacctgccggtataggtactgattcaaataacagctgaatcctcaaagatcgcatcacgctggattttaggacgtcgcgagctagccgagttggggtgcgcccagcacgtaggaaccggaacctacacaaagtaggtgaggattctgagcactgcgtcagcccaaaatggcgacgcgcagtagcctgtcaccttacaggctcgagcttagcgcaccgaggggcgctccggcggctcacgccgctacgaccccagcggcacgctttcactcgcatccgtattagtgttgctgacttatcacgtcaagaaccgaagaaattacactccattgaattttagggcgacgcgcagtagtcaatcacccaataaaaaaccccttgtgaggataacctcacaaggggctctataatagagggagttgaccggtaagccgggttctgtcgtggacagtcattcctctaggccagcaatcgctcactggctcaagcagcctacccgggttcagtacgggccgtaccatgtgaacccctatttggccttgctccgggtggagtttaccatgccacggactgttgccagccgcgcggtgcgctcttaccgcaccctttcacccttacctgatcccacttgcgcgggccatcggcggtttgctctctgttgcacttgtcgtaggcttgcgccccccaggcgttacctggcaccctgccctatggagcccggactttcctcccctccacctgtctcccccgagagggacggcagtgaagcggcgactgtctagtcaactccgcggcggattatagtcacattgaagcggaatgtcatctttcacttgaaacaaagatttatagtgattaattatcaaacaaagtgattttatcgaacgtggcttaactctgttttgcatatgcgataataaatgaagccgttacccgcgcaattgggtcaatgtatggcgcgatatgttctcttcctccgataccgcgtgaatgacctattttcactttattacagctcaacaaactcatagataattgtaaagatgctgacaaaaattaccttttcgatcaaaacaatacgcagaatttattagctagaattagaactgtcaggccaacatttcactcgagcgttctaggagctgtactatgaaaagtatcgcgctgttcattgctccacttgccgcaatttttttgctcagtagctgtgtggtggaacccgctcgctatcgcgaatctgaatttgtggtaccgccgggcatagtttatgtcgctcctgaatatccaatgccagggccgggctatgtttggcgctatcatgaaggccattcgtggggctggtatcaccctgggcatggctggcatcacggttggaaataatgggtaaagagcctgataaaagccggacatcgcgcccggctttgcacattactgcgctgcgtcttcttctgtctcttccgcatcgctctgctggttgagcgcatagcgatataaggcatttttcttcacgccgtggatttctgccgccagcgccgcagctttctttagtggaagctctttttgcagtaatgccagagtgcgcagtacctcagccggcaatgcatcgtcagccagcgctttgtgtccttcgacaatcagcaccatttcaccccggcggcgcatgtcatcttcctgcacccaagccagcaattcgcccactggcgcaccgtggattgactcccaggttttggtcaactctcgcgccaaaaccacgtagcgttgtgggccgagcaccgtcaccatgtcctgcaaactttccaagagacgatgggtcgattcatagaaaataagcgttcgtggttcctcaatcagcgcctgcaaggtatccttacggcctttggtttttgctggcaaaaagccttcgtagcaaaaacgatctgaagcaatccccgcagctgacaacgcagctatagcagcgcaagctccgggcaaaggtacgacccgaatacccgcttcacgacagcggcgcaccaaatggtagccgggatcgttgattaatggtgttcccgcatcggaaaccagagctatactttggccttcctgtagcttcgccagcagttggtcagctttttgttgttcgttatggtcatgaagcgcaaacaggcgcgcgttgatagcaaagtgttgcaacagcaaacccgtgtggcgcgtatcttctgccgcaatcaaatcaacgcttttcagtacctctaacgcccggtgggtgatgtcccctaagttaccgatgggggtgggtaccacgtaaagcgtagatgcagaaatcactgctcgatcgtgttgattcattgtttcatccggattaccgatttaatattgagcatcttgaaaaaaacatcactggatacagtatgctttcctcaacatccgttcgtaccaaagcaggaattttcattcctgctgttctggccgctcttgtcttggctggctgttctggcctggccccacagactccgccgccgtcaaatatacaggacgaagcaagcgcgaactctgattattacctgcaacaattgcagcaaagtagtgatgataacaaggctgactggcaattactcgccattcgtgccctgctacgtgaagggaagctgccgcaagccagtgagcaactgaatacattgcctgaaaaaatgagcgacactcagcgtcaggaacaacagttgctggccgccgagttattggttgcacagaaaaatgcacctgccgccgctgcaatactggctaaattagacgccagcacattatcggcaaatcagcaggttcgctattatcaggcgctgatcggcgccagtcagggtaaaccgactctgccgctgattcgcgcctatatcgctcaggaaccactgcttaaagataaggctcatcaggataacatcgatgccacttggctggcgctggcgcaactgacgcctcaggatttgaatacgctggtgatcaatgccaatgaaaatgtcctgcaaggctggctggatctgttgcacgtatatcaggataaccgacagaaccctgatttattgaaagcggcgatcaaagactggcaaactcgctatccgcaaaatccggcggcgaaatcattgcctgcgcagctaactcagattgtgaacttcactcaggcgtccaccgctaaaattgcgctgctgctgccattaagcggtcaggcaaaagtatttggcgaagctattcagcaaggttttatggcggctcaaagcggcctgccagcacctgcaccaaccgcagaaccgaccattgacgcaagcgcgccagtggacggtgaggccgccgcaacgccggaagccccggctccagttgccgcacctgtcgctgccagcaatgcacaggttaaagtctatgacaccacttctcagccaatcgctgcgctgctagctcaggcacagcaagatggtgccacgctggttgtcggcccgttgctgaaaccagacgttgagcaattaaccgccacgccgaccacgctgaatattctggcgctaaatcagccagaaaccgccaaagacagcccaaatatctgttacttcgctctgtcgccggaagatgaagcgcgcgatgccgcccatcatttatggcaacagcaaaagcaaatgccgctgttgctaacccctcgcggtgcttttggcgatcgtatcgccaaagcctttgctgaagaatggcagaagcaaggcggccagaccgtactacagcagagctttggttccaccgcagagttgaagcagtccatcaacagcggcgcgggtattcgtctgaccggccaaccaatttctgttacaccgacagcggctccgcaatcagtgactatcgccggtttgactatcccggcaccgccggttgacgcgccggtggtttctacttccgcaggcgggaacgtggatgccgtgtatatcgtggcaacgccggacgagctgacgctgattaaacctatgatcgatatggcgaccaccactcgcagcaaaccatcgctgtacgccagctcgcgcagttatcaggctggtgcaggcccggattaccgtctggaaatggaaggcgttcagttcagcgatattccgctgatggccggcgccaaccctgcgttgatgcagcaggcttcctccaagtttgctaacgactattcgctggttcgtttgtatgccatggggatggatgcttggacattgtctaaccactttgctgaaatgcgccagattccaggctttaaggtatcaggctctaccggtgaactgaccgcatcatcaaactgcgtggttaaccgtaaactgccttggttgctataccgccagggaatggttgttccggcgcaataaccggcgttttcaacctgactttagcgcccccgtttccggtcgggggcgaaaataatggattaaaacatgagccaaagggatattggcgcaaattatgaacggctggctcgccgccatctggaacaagccggtctggtctttcattctgccaatgtgagcgttcgcggcggcgagatagatcttattatgcgcgacggtgcgacttgggtatttgtcgaggtgcgttttcgtcggaatgcgacctttggcggtgccgctgccagcgtgactcataccaaacagcaaaggttattacgtgctgcagcggtttggctggcgcagcgcggagccagttttgacacatcatcttgccgttttgatgtttttgcgattaccggtaaccagttagaatggttgcctaatgctttcaatacggattgatcatttttctccggccaaagccgggcaattcattttactgagtgggttaaatcaacgtgctggatagaatcaaagtctgttttaccgagagtattcaaacccagattgctgcggcggaagccttacctgacgcgatatcacgagcggcgatgatgctggttcaatcactactgaatggtaacaagattctttgctgcggcaatggaacctcggcggcaaacgcccagcatttcgccgccagtatgatcaaccgattcgaaaccgaacggccaagcctgccagctatcgcactaaatgccgataatgtggtgttgaccgcgattgccaatgaccgtttgcatgaagaggtttacgccaagcaagtgcgtgctttaggccaggccggagacgttctgctggcaatttccactcgtggtaacagccgtgatattgtgaaagcagttgaagcagccgtaacccgcgatatgacgattgtcgcgcttacgggttacgacggtggtgaactggcaggtctgttaggccagcaggatgttgaaattcgcattccttctcaccgcagcgctcgggtgcaggaaatgcacatgcttacagtgaattgtttgtgtgatctgattgataacaccctattccctcatcaggacgattaaaggagcataaatgaaggttagtttcccattttttgccgtgctgtttagcgcattgctattacaaggctgtgttggtgccgtcgtagttggcagcgccgccgtggcgaccaaatccgcaactgaccctcgcagcgtcggtactcaagttgacgacggcacactagaagcccgagtgaccaacgcattgagcaaagaccagcaactgaaaaaagaagcccgcgtcgtcgctacggcttaccaaggcaaagtactgctaaccgggcaagcaccgacgaccgaactggcaacccgagccaagcaaatagccgctggcgttgaaggcaccagtgaagtgtacaacgagattcgtctgggcaaaccggtcgatctgggcaccgcttcatcagatacctggattaccactaaggttcgttcgcaaatactcaccagtgattcggttaaatcttctaacgtcaaagtcaccaccgaaaatggcgaagtgttcctactcggcctggttacgcagcaagaaggacaatctgccgcgcagatcgccagtaaagttggcggcgtaaaacacgtcaccaccgcctttacctacgttcagtaatttactcacttaaaagcaaaagggcttagttgatactaagccctttttgtttctgccaactcaacctagcggccgttttacagcgcattttcctgtaggaaagttttgccgcccagctgacgcatttggcgtaagatccactgttggcggctaattacatagcctgagggtgcatttgccttaaagcgatgtggattcggcaacactgccgccagcatagccgcttcagaagcgcttaaccggctagcaggcttatggaagaaacgctgcgccgcggcctcaacgccgaaaataccgtcgccaaactccacaatattcagataaaccgtcaaagtgcgccttttggtccacaccagctcaatcccggccgtcaatccagcttccaaccctttacgcacccaactgcggccatcccacagaaacaggtttttcgccgtttgctgcgataacgtcgatgcgcctcggatgcgtttttgattgcgctgattgtgcgccagagccgattcaatggcccccatgtcaaatccccaatggtcagggaatttctgatcttccgccgccatcacggccaaagccatgtaaggggaaatttcgctcataggcacccagtccgaatgcgccacgtaagaaaaatcgccggaaaaccaagctccgagctgcctttcgaccatcaccatggagaagggcacgggcaggaaggcaaaaatcaaaatagcggccagccaaaagcccaacagcgccaaaatgccacgctttagaccacgccagatccatcctatcccgtatttccccaatttcattcgattaagcccagcaccttactcaccagtttgttgataccgacggctgcttctgagatagaaccggccagcatataggcgggcgtggtaacgactttatgctccgcatccaccacgacatcttccaccgggcaaacgatatgttctccccccatggcctcaatagcatcggcggtatcgatatcattaccaatagtcaggcgaattcgctctcccaacagctttggtaacaaagctggggcaatacacataaatccaattggtttgccagacttatgcattgtttgagtaagcttatataaatcttcgtctacagaacacgccgttccttcggttgcgaagcgactcagattcttcgccgcaccgaatccgccgggtacaattaacgcgtctaactgcgccggatcggcggcagaaagtggctgaatcttacctctcgcaatacgcgcagactcgactaacacgttacgattttcgtcggtaatttcaccagataaatgattaataacatggagttgcgtcttgtccggcgcaaagcatactgcctcggctccggcgcgatccaaagccagcaatgttaagacggactcatgtatctctgcgccatcgaaaacaccgcaaccactcaacactacaccgactcttttcatcacaatcctccttttgtttcgctgtcaatcgctaacctgttctagtgacaaacaacaatctctatcacatattttaatgaatcttgtaacaagagcgcttacatttgctatgttgttgcttgtatgatgtatcaacgaatccataaaacctgcggacacacacagaaatcaatacgcaggttcacgttttccctggtgttggcgcagtattcgcgcaccccggcctcggtcggggttattttttttcagcttccgcagtccactcacgcagtacctgaacatcgttacgccattccagtttcagctcatcaatccaatcctgaacgttatcccaccatgctggcaatgaaggcgtttgaatctgctgtgccagttgctgcaaatgccgtaaacctaccgaacctgccgcccctttaattttatgcgcttcttcggcaatacctttttggtcacgagcggtcatattggaatccaacaccgccagataacccggcatcatctgctcgaacatttccaaactctgatgaatcagctgtggtcccaccaaatcgatgtattgctccaacatcacggtatcgagtaacgattcattagtttgcatcggtttatgttcctgtttttttgtggagtgggaaggctgatgatcccagagctgcttgatcattgccgttaaagccgggacagacagcggcttgctcagcacgtcatccattccagcatcaagatattcttttttatcttttagaacgttagccgtaagcgccaccagcggcggcaagtggcaatggccataatccgcgcgaattttgcgagcaatatccagccctgtcatatccgggagctgaatatccaataacactaaatcaaagtcatccggattaaacatatccaacgcatcctggccattcatcgccacctcaacgctgttacccaatttttccaacaccgagcgcgccacaatcacgttgagttcgatatcctccaccagcagcacgtgcagtgctggcagcggcatatcttcatcagacaacacgctagccgcctcatcctgcaccgcaggcgccttgatagacagcgtaaagcaggaaccgatgccctgagtgcttttcacggtgatatcgccgcccatgctctgcgccagccgtttggacaccgccagcccgattccggttccggtagccggacgcccgccgttgctgtctttcacctgataatacatagcgaagattttgtcttgttcatcctgcggaattcccatgccggaatcttccacttcgaagatcagtcggtcaggattttctcgtcggatacgcacaactatctgcccttcctgagtgaatttcaccgcattaccaatcagattccacaaaatctggcgtaggcgagtgccgtcggtgatgattttctctggtaatgaaccctgaggttccatcaggaatttcagacctttaggctgaaccagcaaaccggacaggttttccagatcggtcataaaaccggtaaagtcgatcggttggttgtccaactgcactttgcgccgttccaacttatccatttcgataatatcgttgaatatattgcccagagtgatggcactaacatgaatggttttgaggtatttcagctgttcatcgtttaaatcggtatccagcaagatacgacttaggccgacgatgccattaagcggcgtacgcagctcatggctgattgttgagatgaaagtggtcttatccctgctggcgttctccagcgcgtcttggtagcgcttacgctcggttatatcgcggccaaagcccatcagaccatgccgtttacccacgcgatcgtaaaacggtactttacgcagttcaaaacaggccttacgcccatcggggtacaccagccactgttcgtaggtcagagaaacgttgtggcggaagactttttcatcggtttccattactttttcggcaatatctggcgcgtaaacttcctgtggcgtcaagccgaccagctgtttctcacttttaccggtcagcaactccatcgcgcggttacagccggaaaattcattatcttcgttacggtagtagaccaaatcgggggatgcatcgaggaaggaacgtaatagggcggattgttgccctaattccacctgcgcctgctcacggtgccccatttcctctttcagtttatccacaacctgtagatgggctttctccgctttctcgcgttcgataatttccagatttagctgcgagatattttcctgcaattgctgattcagttcccgatcgcgataacgcatgatttccagcttatctaccagtctggatagtcgctgacgggattcctccagctgttccaccaccactgacaggaagtaaaccgcccacggcgtgattaacaggccgaaaaagatggagcgaacaaaatcgatgctttcgaccgagccgcgtaataccaaagtgacggccatttgcaccaccatcgccagtattaccagcaccgaagccagcagcagcgagaagcgcaccagccctaacttcaccattaaatcaacgtaatactgggctaataccctgatttgcttcataaccactcccgtcaaacttcatgcgataaatcataccgcaaaaccagaaatagataaggcgggttgccaagaagtgtggaaaagactgcaaatcaacgggaaattgcgaaagttgagaatggcgatagcccgcagacacgccaaaaataatgggcgatgcgctgtagccaagttggggtgtgcacagcacgcaagaagcggagcctgcacaaaccaggtgcggattttgatcactgcgtcagcccaaaatggcgacgccctaagcctatctcccaaggcttagggcgttcgagcgacagtcaaactgagtacgcctgcgcgcagtgccccggatttacacccagtagcacgcgaggaggtagcagtacgcgaggaggccgagcacaacccaagttcaggtgacaaacgccttgtagccgatcacctacaaagcggaggcttggcctccgtgggctaacatataccgattcaactccaccataccggtccagcgattttcgcaccacagcggagccaacagggttgggcgacgagcactggcggaaattcggtgatagacaatatcggcgggtgtatgacgaatcatttctccggcggtaaccacatagtcttccagagccagttccggcaaacgccctgctcgccaggctttagccatagtgctgccttccacgatatgaagcggatgcagttttagtccatccacgccggtatccacaacttgttgcagagtttgcaggcattgcgcttgattttcgccgggcaagccaacgatcaaatggcaacacactttcagaccgcgcgcgctggcacggcgagccgtttgttggtagctggcgaaatcatggcctcggttaatacgtttgagggttttatcattggcagtttgtagccccagctccagccagacttcgtaaccttgccgatgataaccactcagcaggtctaataccgcatccggtacgcagtctggccgggttcccacacaaacgccaacgatatccgcttcggctaaagcctgttggtacatggctgccaacgcattaacttcggcataagtgctggtataagcctgaaaataagccagatagcgattagctcggttaactttcttcgcctgcgcttccagttgctcgctaatggttcgtagctgcatttgttcgtcagcaaacgaagccacctggcaaaatgtgcaaccaccacgccccagagtaccgtccctattcgggcagctaaaaccgccgtggagcgtgagtttatggattttttcaccatagcggcgctgtaaatccgcaccaaacatattgactaattgctgcaactgcataatctggaggatgcctgtcgtaaaagtcgcttagcctaactggtcagggtgttccgtgcgatgacagagatcaactcccactccctcgggtgcaacttcgcataaccattcactataaatgcaaataaaatcatttagctaccgattaatttttctaatctcggcaaacaccttaccgcatctattacaaattgatgaaaaatagttttaaatgtcacaaaatcattaaatcacagaatatcactctgacatccccaccagcactagcatggtgcagagatttgacgattgcactatagtgagacagctcacacttctactgcccatcaacgactctttcaccgggtcaaaaatgcataaattatttttaatatcatatagataaatcattttttgtgatctggatatatcttaggcctatatttgacctcggtattctttctcgctaagttggaagtccgctggaagctttctagacgggcaaacgtctagtcataattatgcagttatttaagactccctcttaaaacaagtcatataccacttgtgagaccatcacgagaggtcattgacggagggcggaaaagcagatttgccgcgccaggcgcgcctgtcagcccacccgtcaccgtgaattgtccctcgcagtcggttgtgagagtcacgcagagcctggggaggttcactgatatgttgtacgataaatcccaagagaaggacaattgcggttttggtctcatcgcccacatagaaggcgaaccaagccacaaggtcgtgcgtactgcaatacacgcgctggcccgtatgcaacaccgtggtgctattctcgctgatggtaaaactggcgatggctgcggtttactcttacaaaaaccggatcgttttttccgcatggtcgccgaagagcgcggctggcgtttggcaaaaaattacgccgttggcatgatattccttagccaaaacgatgaactggctaacgcaagccgccgcatcgttgaagaagagctacaaaacgaaaccctttccgtggtgggctggcgcgaagtgccgaccaaccctgatgttcttggtgaaatcgccctttcctctctgccgcgtatcgaacagatttttgttaacgctccggccggatggcgcccgcgcgatatggagcgccgcctgtttgtcgcgcgtcgccgtatcgaaaaacgcatctcagatttagatttctacgtttgtagcttctccaatctggtgacgatctataaaggcctgtgtatgcctgcggatctgccacgtttttatctggatctggcagatttacgcctcgaatcggccatttgcctgttccatcagcgtttttccactaataccgtgccgcgctggccgctggctcagccgttccgctatctggcgcacaacggtgaaatcaatactattgccggtaaccgtcagtgggcgcgcgctcgtgcctataaatttaaaacaccgctgattcccgatttgcaggacgcagcgcctttcgtcaacgaaaccggttcagactccagctcgctggataatatgctggaattgttcctcagcggcgggatggatctgatccgcgctatgcgtttgctggtaccaccggcttggcagaataacccggatatggataccgacctgcgtgccttcttcgactttaactccatgcatatggagccgtgggatggcccagcgggtatcgtgatgtctgacgggcgctacgccgcctgtaacctcgaccgtaacggtctacgtccggcgcgctacgtgattaccaaagacaagctgattacctgcgcttccgaagtagggatctgggattaccagcccgatgaagtggtagagaaaggccgcgttggccccggcgaactgatggtgatcgacactcgcagcggcaagatcctgcattcagccgaaaccgataacgatctgaaaagccgccatccgtacaaagaatggatggaaaaaaacgttaagcgcctggtgccatttgaggacctgccggaagatcaggtcggaagccgcgagctggatgatactcagctcgaaacctatcaaaagcaattcggttataccaacgaagaactggatcaaatcatccgcgtattgggtgaaaacggtcaggaagcgacaggctcaatgggcgatgacaccccatttgccgtgctttccagcggcccgcgcattatttatgactatttccgccagcagtttgcgcaggttaccaacccgcctatcgatccgctgcgagaagctcacgtgatgtcactggcgaccagtatcggccgtgaaatgaacgtattctgcgaggccgaaggtcaggcgcaccgtttgagctttaaatccccgattttgctgtattcggatttccagcagctcactacgctggaaggcgagtattatcgcgccgatcggctggatctgacgtttgatccgagccagcaagatctgcaacagcgcgttttatcactgtgcgacgaagccgagcgtaaagttcgcgatggtgccgtaatgctggtgctctccgaccgctcgatttcccaaacccgtctaccggtgcccgcaccaatggccgtgggtgcgattcagactcgattagtagaaaaaaacctgcgctgcgatgccaacatcattgttgaaaccgccagcgcccgcgatccgcatcacttcgccgtattactcggctttggtgctaccgctatctatccttatttagcttatgaatcattggctaaattggtcgacacacaggctatagataaaaagtaccgcgatgtgatgctcaactatcgcaacggtatcaacaaaggcttgtataagatcatgtccaaaatgggcatctcgacgattgcgtcttatcgctgcgccaagttgtttgaagccgtaggcctgcacaaagagctgtctgaactgtgtttccagggtgtggttagccgtatcggaggcgctaacttcagcgatttccagcaagatctgcaaaatctctccaaacgagcctggctcaagcgtaagccgttggatcaaggcggtttactcaaatttgtccataatggcgaataccacgcgtataacccggatgtggtcaatacgttgcagaaagccgttcacagcggtgaatacagcgattacgaagcttactcaaaactggttaacgaacgtccagtggctacgctgcgcgatctcttggcaatcaagccgcaaggtacgccgatcccagtagatcaagtggaaccagcagaatctctctttacccgtttcgatacggcggcaatgtctatcggcgcgctcagtccggaagcccacgaatcattggctatcgctatgaatagtttgggtggattctccaactccggtgaaggtggcgaagatccggtgcgctatggcaccaacaaagtctcgcgaatcaaacaggtagcatctggtcgttttggtgtcactccggcctatctggttaacgccgatgttattcagatcaaagtagcccaaggggcaaaaccgggcgaaggcggccagttaccgggtgataaagttacgccctacatcgctaaactgcgctattccgtacccggtgtgacgctcatttcgccaccgccgcaccacgatatttactccatcgaagatttagcacagctgattttcgatttgaaacaggtcaatccgaaggcaatgatttcggtgaaactggtttccgagccgggagtcggcactatcgccaccggcgtggccaaagcctatgccgatttaattaccatcgccggttacgacggcggcactggtgccagcccgctttcatcagttaagtacgccggttgcccgtgggaactgggtctggtggaaacgcaacaggcactggttgctaacggtctgcgtcataaaatccgtttacaggtggacggcggcctgaagaccggcgttgatattgtcaaagccgcgattctgggtgcagaaagcttcggtttcggcacggggcctatggtggctttaggctgtaaatacctacgtatttgtcatctgaataactgcgccaccggtgtagcaactcaggacgaaaaactgcgtcgcgatcactaccacggcctgccggagcgcgtagtcaattacttccagtttatcgccagagaaactcgccagatcatggccgaactgggcgtaagccaactggttgatttgattggtcgtaccgatatgttgatcgagttggatggcatttccgccaagcagaacaagctggacttgtcatccttgctggccacagccaaaccgcatccaggcaaagcgctgtactgtaccgaaaacaatcccccgttcgataaaggctcactgaacaaagcgttgctggaacaggctgaaccgcatattgaagccaaacaaagcaaaactttctactttgatattcgcaacaccgatcgctcggttggtgccgcactgtcaggggcgatcgccgcgaagcatggagatcaagggctggcgaccgatccgatcaaagcgcatttctccggtaccgccgggcagagctttggcgtatggaatgccggcggcgttgaattaacgctaaccggtgatgccaacgactacgtcggcaaaggcatggccggcggtcgcattgcggttcgtcctccggtaggctcggctttccgtagccatgaagccagcattgtcggtaatacctgtctgtatggcgcaaccggcggtaagctcttcgccgcaggtcgcgctggtgaacgtttcgccgtgcgcaactccggcgctatcaccgtagttgaaggtatcggcgataacggctgtgaatatatgaccggcggcatcgtctgcgtgctcggtcgcaccggtatcaacttcggtgccggtatgaccggtggattcgcctatgtattggacgaagacggcgagttccgtaaacgcgttaaccctgagttggtagaagtattggatgtcgatgaactggctatccatgaggaacatctgcgcgggctaatcactgaacacgttcagttgaccgggtccagccgtggcgaggaaatcctggctaactggccggattgggttagtaaattcgccttggtgaaaccaaaatccagcgatgtgaaagcactgctgggccaccgtagccgttccgcagctgagctgcgggttcaagcgcagtaaggggttaaaatgagtcagaatgtttatcaatttatcgacttacagcgcgttgatccgccgaaaaaaccgctgaagatccgtaaaatagaatttgtagagatttacgaaccgttctcggaaacccaggcaaaagcacaggcagaccgctgcttatcctgcggtaatccttactgtgaatggaaatgtccggtacataactacatcccaaattggctgaaactggccaacgaaggacgcattatggaagccgcggatttggcacatcagaccaatagtctcccggaagtctgcgggcgggtttgtccgcaagatcgtctatgcgaaggttcctgtacgctaaacgacgagttcggtgcggtgaccatcggtaatatcgaacgttatatcagcgataaagccatagaaatgggctggaagccggatatgtcacacgtccatccaaccggtaagcgcgtggctatcatcggcgcaggtcctgccgggctagcctgtgctgatgtgttgacccgcaacggcgtacaagcggtagttttcgatcgtcatcctgaaatcggcggtctgctgacctttggtattccagccttcaagctggaaaaagaagtgatgatcaaacggcgcaagatcttctccgaaatgggcattgagtttcgactgaataccgaaatcggcaaagacgtggcgatggaaactctgcttaacgattacgatgcggtattcctcggcgtgggaacttatcagtcgatgcgcggcggattagaaaacgaaggggcagccggcgtctacgatgcgctgccgttcctgattgccaataccaagcaactcatgggttacgcggcaacctcggacgaaccttacgtgaatatggaaggtaaacgcgtggtggttctgggcggaggagataccgcaatggactgcgtgcgcacctcaatccgtcagggcgcaacgcacgttacctgcgcctatcgccgtgatgaagtgaacatgccgggttccaaacgagaagtaaaaaatgctcgtgaggaaggcgtcgaattcaaattcaatctgcaaccgctcagtattgaagtaaacgatgcgggtaaagtttgcggcgtgaaaatggttcgcacccaattgggtgcaccggatgcgcaaggccgccgtcaggctgaacatattgccggttctgagcacattttggatgccgatgcggtggtgactgccttcggtttccgtccacataatatggaatggttagccgctcacgctgtcaatctggataaacaggggcgtgtagtcgcgccagaaagcgccgataacgccttccagaccagcaacccaaaaatctttgccggcggcgatattgtccgaggctcagacttggtggtcaccgctattgccgaaggccgtaaagcagccgaagggattatggggtatctggaagtctgaatttgccagtaggtaggcagaaatacactaaaagggctgatattcagccctttgttatttcactctcatataaatggcgagccatcatttgtgggtaaccatatatcaaattgaagtcttcaatcagctcaccgaatcaggtaactaatccttgggaaaaatgattttaccctgatcgtctgaagggctgactttctcagagatatgtagaatttcggtccttttacccggaatcggtaataaactaagtgaaccattgaaaatacctgagaaataggccttaccaccaatcatacgctcaccgatattcactctatcttctgctaataactctatttcacgattatctgaaccttgaatacgctcaaatgtcatttcttttgccttaacaatcgcatgttctgcaaaattgagctcacctaatgttatgttttcttttgctgtcatcttaatatttgtagcattcaccgaggcatcactcctggttttggtaatactttttccagcactcataatgaccttctgtctagcacttaggccgttggtagagatatcgccagacatactagccagataaacattgcctccagaaatagaaccttctgtgactaaattatcgactggtgctaaatttattgttccgttggcctcaagagcagtggcatttaacttaccaaaagtcttcatggtaatatcttgctcagctctaatatctttaacaagcagtggatttctggaaccactacgatatttaaccgagttgatgccgctgtcagcgtttgctacaaaaccgctagatgcagaatttacaacaccttttaaggtatcggttttattgaaatggttctctaaataataatcacctcctttcgtcatttcattacctacagtgatagttttcgctataatttctgcccctgcgttactgctttgtactacgctaccctcgctatttaatacaacatcttttgcattgatcatgcttttaatattagttgaaatacccgaattaagatcaatagtcccattagggctattcaaacttcccgccaaatgctcaacactctcgccaatcaatttaattcgaccattattactttctacgacaccagcattaatcacatttctatttaccacggaataccgcgcatatggcgcttccggtattaatctaatatttgagaatgcgtgccttttatcttgattattccaagatgttgtatcaacttttaccgacatgccactatctccaactgatagtgtcatgtcatcgccagcagccaataacacttcatttcctgaatcaataacgccttcattaccaacagcagctcccatcatcacaacattatctttcgctgtgatttttcccaggttaacaaccaagccaccacgagcgtccccagaaaatgcgatatttccaccaggtgtagccataaaattatcattagtggaattcaagctagacagaaccaagctacctacatcaattttggcaccgtcggtaatggtaacgccgcgcggattaacgacgaaaacctgtccgttagacaataaattaccttgaatgtaagtttcaaattgttcgtgaacccgatttaaaacagcggaattagtattaggttgttcaaacttaacggtttcacctggtgctataccgaagttagtccaatcaattaccgctctgtcactattctgcgtaataatagtagtattctcagggcttttttcaccaataattgcattacccgcagtgacttccccaacgcctaatgcataaacttggccacttaatataaagctaatacaaacggctagaggtttggctattctattacttttcatgataactcctttatatgcagcaatatctatccctgattagagatagccccgcgaaataatcgcgtaagatgtttatataaaaataaatgtcaactcagatgataattaaaaataaataacacaaccaatttattcataaaaatatgatttaagtgaaaacatggttattatgaaattattattagaaattaatcgaaccggttaaccaccatcggccacgatcggtagcgccaagtaaattatctactgcgccagcccgtctggcataagtaatatcaatgtttcctcgatcgtgctgataagtcagccctgctccataaccttgtaataaaacatgattagattgaccgattcctttatttgccagtaaagagccttgggcgtaatcatagaaagcatgagtactgattccaggatataacgtagttagatccaggcgtaatgctggggatagggaaaaacctcggtctacgctaatcgtattcacatcataagcccggacaatcgatggaccacctagcgccattttttccacgccgtccatattctgatgactaaattgcccggaggcacgcagactagcgccaaaataatcgttgagtcgctgtaatcccataccctgggcttcccacttccaaaattccccacggttaggattatcttgctgcgcatcccttaactttccacgagttaatcctgcacgatagttaaaaatattaggttgtccaaaccatcggtgacgaaagtccccattgagactcaaacttatagagtcttgctcacggtgagaaatgaaggtcaatattttatccctcatccacttataatccccctgtacacccagagataaattattgcccgcagtacggataaccggccaagagctataaatcgagagcacatcagcattactgtcgataaaaccggtaaatcttccccccggctgcgactcaacccgactataagaaataccgccccgtgcgccttgataacctaagggtaaatcataggcaatattgcccaggatagttttggcatcattggaatctttattttgcaggaactgaggaacatagagcaccattccctgtaagcgatccgccgatcctgttgggttattaatggtcattcgagcaaaagtccggatgcggccggaataacgccccccatgattatccatcatcaaacgtccgctaatcactggctctgatgccacgctcacgctcagctgcgagctccctacctgttcacccggtgataatattgaagttaatggcccgattcctggctgatcccctaagcgcagcagcgcgctttccatttgactaatatcttcaggttgcttattccctgcctgtaggaatttatttatcaaactatcgcgcacgttagattgattgttgtgtagatgaattttctctaactgcccttgcaccacctgaatataaacatgaccttcagtaatatcttgttctggcaaataagcaaaactaagaaggtcgccacttttgcgcattatcctttctatttccaatggaatagcctgtagctgggataagctcatattctgattctgtcgcgcggctaatagcgtatttacttgttcccgatagcgctccggtaaagatttcacacctagcgttgccactcgcagcatttgccccgtgtcgcttttcgaattggatttttcgcgttggtcaatgactggtttctgctgcaccctcgttgtttcttgggacaatagttgttcattatcttgtaaaatagccgcgctacctgtaacgactcctgataaagacggggtatttgcccaacttttctgattcaaacctaataacacgaaataaaataaaaagtaatgaatagagtgagtaataaatctattattttcgcgcatgggagaatatccagtcatattataagttccttttaaatgcgcattatcactccttgcattccaattaatgacattgatagatattaatcatataaatatccatactagatcatcaaagttaacaatggatgctttgcgttttaatatttaaataaataatatcatttcaacgtagccacatcattaactcactacttaatgacaatttcaattaattaaccgcagcaagctttaattaagaatattctgcactaaaatatttactatataaatataagcaatgaaacacaatgtaatacatataaataaaatttgtatcatgaaattaaacatgggtttttgttatgtatttaaaaataattaccagcatgattcggatgggaaataaaaattaataatattatcaaatgaatagggtagaaaaataaaaaaattgtaacaatcaagtcaactatattcatcgcgatctatacataaatagctataatgactgacttatcttcgtgtaagcgcagatattggcacaggttagctattgaacaaataaattattttaatttgttatagttacaacccgttattttgatcaaggatatcgatgatgaaaacccctttgctattactcgccggtggtttactggtcaccagtttcagttctctggctatgtcactgaattatcaggaagtaggctacaacattgaagcacgaggagccaaagcggtagtagcagaactggctaaatccgggcaactgtcggcggtagaaaataatatcaagctgggtgatgataactggattgcgatggcgccgaagctagtagaaggtgggaatcagaaatttgcgcaaggcgttaaatcagcactgtcttcagccctgatttataatccagcggcggtcttgaaggccgtaggcgatagccattcgttaactttgtccgacgtctgtactgctccgactgatgcaacagatagcaccgccaaaatcaacttcaaacaacgggcttccagaactctatcgactatcagaaatagcgatatgatgaccacgcgggatagttgcatcgccgaattgcagaagctgtcttaacgatcggcttttgagccagaaacaacaagggcggcctaagccgccctataataatacgcagaacactcggattattatttcacaacccgtaatgcaggccgtccaccccgtggaggctgcggaggctcatcatccggtttgctgctgtccagctttgcctgagtctcatcggtgaccagcaccaggctttcgctcggcgcgttttcttcgttctggtcatccatctcggcaaaataaccttctgcgtcggcatcataagccgcttcaggttcaaacatcgtacccgcgccgttttctctggcataaatagccagaactgcgcccataggtacaacaacctgacgaggtacaccgccaaaacgggcattgaaacggacatcttcattacccagttccagattacccaccgcccgcggcgcgacattcaatacaatttgaccatcacgggcaaattccattggaacctctacgtcgggcagcgtcacatctaccactagatgcggtgtaagctcgttatcaatcagccaatcataaaatgcgcgcagcaggtaaggacggcgcggagacatatctgacatctccataaccattaaccttgaatgcgcaaacgcatttcgcgctcaggttcagtcagcgaggccaggaatgcatcacgttcgaacacgcgagtcatgtagcctttcaattcttttgaaccagcgccgctcagctcaatacccagttcaggtaaacgccacagcagcggtgccaggtaacagtcaaccaagctaaattcttcgctcatgaaataaggcgtctgaccaaagattggagcaatggccaacagctcttcgcgcagctggcgacgggctgattctgcttcctgaccggttttttgctcgattttgtacatcagtgaataccagtttttctcgatacgcagcatcatcaaacggctttcaccacgggcaaccggatacacaggcattaatggaggatgcgggaagcgctcatcaaggtattccatgatgatacgggattcatacagagtcagctcgcgatcgaccagcgtaggtaccgtttggtacgggttgaggtcaatcaggtcctgcggcaggttatccatctcaacctgctcaatctcaacgctgacacctttctccgccagtacgatacgtacttgatggctaaaaatgtcggtcgggccagagaacagcgtcattaccgaacgtttgttggcagcgacagccatgaaaacctccaagtttatctagaaaacagtgcgaatagccaacacaacggttgctatcctgagtagttttaccgccagttcactgtctcgaccaatacgccgttaataagccttggtcgagataatcattcagccagggagataaacggacgtcagcagctcggcgaacaggcacaaaagtgtgtgatagtttaccagattttgcttgttttgtggggatggtgcagtgatttcatggtgatttgtctgacgactcgcagtttagaccgcataatcgcagcccccaatagggattactcgaattttaggcataaaaaaacccggtgaggcaccgggtttttagcattaatatgatgccgtaaaggcaaaaaattaacgtttggagaactgtggacgacgacgtgctttacgcagacccactttcttacgctcaacttcacgcgcatcacgcgttacgaagccagctttacgcagttcaccacgcagagactcgtcatactccatcagtgcacgggtgataccgtgacggatagcgccagcctgaccagaaataccaccacctttaacagtgatgtacaggtcaaacttaccaaccatatctaacagtaccagaggctgcataacgaccatgcggccagtctcgcgaccgaagtactgttcgatgctacgttggttaataacgatgttaccgctacccggcttaataaagacgcgtgcggaagaacttttgcggcgaccagtgccgtagtattgattttcagccattgccataatcccgattaaatgtccagaacttgcggttgctgtgccgcatgggtgtgctcagtgcccgcgtaaactttcagtttacggaacattgcacgacccagcgggcccttcggcagcatgcctttaaccgcgatttcaatcacacgctcaggacggcgggcaatcatctcttcaaaggtcgcttgtttgataccaccgatgtgaccggtgtgatggtaataaatcttgtctgtacgcttgttgccggttacagcaactttatctgcgttcagaacgatgatgtaatcaccagtatcaacgtgcggggtgtattccgctttatgcttgccgcgcaggcgacgagccagttcagtagcgaggcgacctaaggtcttaccgttcgcgtcaacaacataccagtcgcgttttacggtttctggtttagctgtgaaagttttcattaaaagcttacccaattataagttacacgttggtgaacacccaaacgctcaaatcaacagttgaggctcacacgaccatcaagtccagcaaacctaccccttcgaatagcctatgctggcactataaagtttttgggaaaaaaactttattgtaacgtggggtcgcaagattatagagaagtcggttgcaaagatcgaactgtttttggcgtgagaagcataaaattacaggtgttcaatcgggcgatcaacgatcgccctggcgcagaatagcatgtttaaccagcaatgtgcgagcaacgacgtcaatatactgcaacctgacgttttacggcagatgaggcagtttaaggtactcttcgctctgcatctcttgtaggcgcgataaacagcgttgatactcgaattttaagcgctccccctgataaatttcaaacatcgatgcttctgcagagataattaacttcactcgacgttcgtaaaactcatcaaccaacgctaaaaaccggcgtgcggcattttcttcctttgccgtcatcaggcgcaaattgtgaagtaataccgtgtgatactcgcgggacagcgctatgtaatccaactgactgcgagcttcttcacataatgtatggaaatctaccgccagcacgccatcagcagcgctaatagctgccagcgggcgatgattaatctccaaaaccggcttttcttcccccactttccccgccagtttaataaacatctgacgcatattttgttcggtttgcgggtttaacggcgtgagatacaagtgtgcctgcgtgagtgtccgtaaccgataatcaataccggcatcgacgttcatcacttcgcaatattctttaatcagggcaatagcgggaatgaagcgcgctcgctgtaaaccgttttgatagagattgtccggcggtatgttagaggtggcaatcaacgtgataccgcgagcaaacagagcctgcagcagcgtagccagcagcatggcgtcggtgatatccgaaacaaagaattcatcaaagcacaacacatcggtttgagctttaaatccgtcggcaattatttccagcggattttcatggccttgcagttcggccaattcctgatgaacccgcagcataaagcgatgaaaatgcagccgaagcttacgatcgccgggcaaactgtggaaaaacagatccattagccaggtttttccgcgcccaacgccgccccacatatataacccctgtactgggggagtgaccgctaaagcgtggtttcttcctaataaacgactcaggcgaccacgcagacccagcgtgggtgtcggccgatttgcccgctcacacaaagccaaataaatctgttccagttgctcaaccgcttgacgctgaacctcgtcgggctgatattctccagcggctaaagcctgctgataacgtgctgtaggtgtactaggttgcatgtttttcaacaatccctgataaaatatttatctgtttttcgctgcgcttttatgctgatttatctggtaatcgacgcatttaacgacggtaatgccatcggaaaaagtatgataaccataggcaaagttgcatcaggattccactctgacaaggttaacggttatagtgggtattattagtgaaaaagccctaccgaacaatgaagtcaaaaaaggagtcattatgacctgggagtatgcgcttattggattagttgttggtatcgccatcggtgcggtagccatgcgctttggcaatcgtaaattgcgtcagcagcaagtgctgcaaaacgaactggaaaagagcaaatccgatctggaagaatatcgtcaggagttggttggtcatttcgcccgcagtgcggaattgctggacaatatggctcgtgactatcgtcagctgtatcagcacatggcgaaaagctcgaataacctgctgcctgatttaccaatgcaggacaacccgttccgctaccgtttgaccgaatccgaagcggataacgatcaggcaccggtaaaaatgccgccgcgcgattattccgaaggggcgtccggtttgctgcgtcctgaacatcaaacccgcgattaatctgacctatcaatatgttgtccagatagcgcactcccccgcgctatctggttatctttaatttacccttcttttacagttctatacttaccactccttgaatcaccgacccccgatccctatatgatggaatatcacgtggtcgcttctggcggtaatcgcagtagctttttgaaataagtgaattttttaccggtccaacggtcttagctttcagtgggcctatgccgcaatatcactaattcattcaccgttaggtattgagagagtttaatccaatgaaaaaaaagtcattacttcttagtgcactagctataagcgttggccttagccttgccgctgcaccggcggttaccgcagcccccttgccaatggccgtcgccggacaacctttgccaagccttgcaccaatgttagaaaaagtcctgccagcggtagtcagtgtccatgtgaccggcactcaagcgcagcaacagcgtttaccggaagagtttaaattcttcttcggcccgaatgcgccgatgagcaaagaaagcatccgaccgtttgaaggcctgggctcaggcgtgattattaacgccgagaaaggctatgtgctgactaataatcacgttatcaataatgcagataaaatccgcgttcagttgaatgatggccgtgaatatgatgccaaactgctggggcgcgatgagcaaaccgatattgctctgttacagattacggatgccaaaaacctgaaagcgattcctatcgcagattcagacaatctgcgagttggtgatttcgccgttgcggtcggtaacccattcggtttaggccagactgcaacatccggtattatttccgctctgggccgcagtggcctgaatctggaagggctggaaaactttattcaaaccgatgcttctatcaaccggggtaattccggcggcgcgctggttaacctgaacggcgaacttatcgggattaacacggccattctggctccgggcggcggtaacatcgggatcggctttgccattccgagcaatatggcgcaaaacctaagccagcaactgattgagtttggtgaagtcaaacgcggcgttttaggtattaaaggcagtgaaatgaccgccgacatggccaaagcctttaatatcgacgcgcagcgtggcgcattcgtcagcgaagttatgccgaaatctgctgcggcgaaagccggtattaaagccggtgacgtattggtttctgtggatggcaagccaattaacagcttcgccgagcttcgcgctaaagtcggaacgaccgggccgggtaaaaccatcaaagttggcttactgcgcggcggcaaaccgctggaagtctcggtaacgctggaaaacagcaacccgacctccaccagcgccgaaaccctgtcttcatcattacagggtgcgtctttgagcaacaccgaaattaaaggcgtaggcaaaggcgttaaagtcgataacgtcgctaaaggttccccagctgcacaggccgggttacagaaagatgatgtgatcatcggtatcaaccgtcagcaaactaaagatatcagcgagttacggaaagcgctggcaactaaacctgcggtgatggcgttgaatatcatccgcggcaacgaaaccatttatctattattacgttaatttgtagaaaaatcggacacagcacaatgctgtgtccggttaactcatgctattctgccatcacctatctttcatgccttaaacctcatgtttattaagctattgcgatccaccattattgggctgattgttgccggtatattactggctgcgctgcccgttttgcgttcgcccggttacctgttcgccggaaaagcagagagcacagatagtgaagttcccgttagctacaaccttggggtgcgcagagccgcgcctgcggtagtcaatgtgtacaaccgcagcatgggtgccaccgctcaggacggtctggccattcgcactctgggttctggcgtgatcatgagtgacaagggctatattcttaccaacaagcacgtggtgaataacgctgagcagattattgtggctctgcaagatgggcgcgtgtccgaagccttgctggttggctccgacaatatgaccgatctggccgtgctaaaaatcgatgcgggcaatttgccggttataccgattaataaccacagaatcccacatgttggcgatgtggttcttgccataggtaacccttataacctagggcaaacaattactcagggcattatcagcgcgactggacgcataggtttaagctcatccggtcgacaaaacttcctgcaaactgatgcatcgatcaatcagggaaactcggggggcgcgctggtcaactctctcggcgaattggtgggaattaatacgttatctttcgataaaagtaacaatggcgaaacgccggaaggcattggcttcgcaattcctaccgttttagccactaaagtaatggaaaaactgattcgcgatgggcgagtcattcgtggctttatcggcattaccggcggcgattatccgccgttccacgccaatacccgcaatgcttcctctaatctggagcgcattcacggtattaaagtgaatcaggtttcgcctaacggcccagcggcggcggcaaatatgcaggtcggtgatattatccttagtgtgaataacaaaccggcaatctctgcagtagaaaccatggatcaggtagccgaagtccgtcctggcaccactattcccgtggttattctgcgcaatggcgaacaaatcaccctgaacttaactatcagtgaatatccagacagctgatgggatgaaataatctgagttacaggcaaaaaaagccggtcagttgagaaacctgaccggcttttttatatctgggttcggttaaatctggcatgactacatacctgccagattaaatctcagttagctaagccgcagcaaagcttactccccttgcactcgttcgatgttggcacccaacgcacgcagtttgtcttcaatacgctcgtatccgcgatcgatgtgatagatacggtcaacgatagttacgccatcagcgatacaacccgccaataccaagctggctgaagcccgcaggtctgttgccataacctgcgcgccagagagctgtttaacgccatggcaaatcacggtgttgctttctatttctgcacgagcgcccatacgaatcaattcaggaacgtgcataaagcggttttcgaagatagtttcggtaatcacgccagtaccttcggcaaccagattcagcaggctgaactgcgcttgcatatccgtcgggaaacctggatgcggcgaggtacgcaaagtcacggccttaggacgttcaccgtgcatatccagactaatccagtcctcacctacttcaatatccgcgccggcttcacgcagtttcgccaataccgcatccagagtatccggacgggttttgcgacacacaactttaccgccagaaatcgccgcagccaccaggaaagtaccggtttcgatacgatccggcagtacgcgataaacgccgccgcccaaacgcgccacgccttcgattgtgatgcggtcagtgcctgcgccggtaatttttgcacccaacgtgttcaggaagttcgcagtatcgacgatttccggttcgcgggctgcgttttcaataatcgtggtgccttcagccagtgtcgccgcactcataatggtgacggtcgcgccaacgctgaccttatccataacgatgtgagcgcctttcaggcgaccgtcaacggaggctttaacgtagccttcttccagtttgatttcagcgccaagctgttccaaaccagagatatgcaggtcaaccggacgagcaccgatagcgcagccgcctggtaaagaaacctgaccgcgaccaaaacgcgcaaccaaaggccctaacgcccaaatggaggcgcgcatggttttcaccagatcgtaaggcgcgcagaatacatcaaccccgctggcatcaacaaaaatcgagccattacgctcaattttagtacccagttggctcagtaatttaatagtggtatcgatgtccttcagatgaggaacattctgtaattccaccggttcttcggccaacaacgcggcaaacataattggcagggcagcgtttttagcgccggaaatagtgacttcaccacttaggcgagtccgcccctgcacacgaaatttctccatttgactactctctgttgtcagattcgatgtcgctgttcgccgtagccaacagcattaaaagccgttaagtttgcgatcccgctgccactcttgaggcgtataagctttgatcgataaagcatgaatgcggttatcagcgatgtattccatcaaaggcgcatacacagcctgctgtttcttcacgcggctcatatcggcaaataactcaccgacagcaatcacctgaaaatgactaccgtcgccggtcacgtgtgcttcctgtagtgccaatgcgttcatcagcacatctttaatttcgttggtatccataatattcattctattttcagaggatcataatcagtcaaacatagtagatgaatacggcgagctcttaaactaaagaaaagcccctgtgtcgtaagttacgtacaggggccagaatgccgttatgctcaactaaggtcgtgcgacgcgctaagttgccgccgtgactggaattatttcctgtaagttgtataacgtaatcagcgtcgccaaacgatcgctgacgcctgaaattttcagctcgacgcctcgctgatgcaacgcttcacgtaaatgaaccagcaacgccaaacctgaagagtcaacacgctgtaactgcgccacattcaggcaagttttatccgccagcaaagcgttccgctgctgccacagtggcagcaaggtttcacgatccagatccccaatcagccacagcgtgctgccttgggattcccagcgaagctcatctgccataattatttttgatccaacgtaataggctgtttggcggcgattaacaattgcttagtcaaaccgtctacaccctgagtgcgcaaaatcgatgcccattcattctgcttggtgctgatcatgctgacgccttccgcaatcatgtcaaaggcttgccagtgaccagtttgactatttttacgccattggaaatccaaacgcaccggaggtcgtccattggggtccaaaatggtgacgcggatagcgataatattagcatcacccagcgggtgttctggcgcaatttggtaagtttgaccgtgatataaagccaatgcctggccgtaggcctgttccagatattggccaaaagcgttgaaataggcttcgcgctgagctggcgtggcgcttttgtaataagtgcctagcactaaggctccggcgtatttaatctgcacgaacggcatcagttcttcatgaacgatggtgcgcagataatctggattctgcttaattttaggctgttcgtttttcagacgagtgaaagttttttgcgctgcatcgtccatcagacgataagggttggtttgatccacggcatttgccaacggtgccaccaccaacagtgcgaccattaataaacgtttaaacattcaaatgccctcttaatgaatttgagccgcaggaggagtagaaccccctgccggtgcagtttcaggggtttcctgattattaccgccgcttttgtacaggaactggccgattaaatcttccagaaccaatgcagatttggtgtcctgaatggtgccaccctctttcaaaatactggtgcccatttccggatcttcaaaacccacgtttaacgccagatattgttcgcccaataaacctgaggtacgaatcgctaaagagctggtatcaggaattcggttatattgatcctctatatcaatcgcaactcgcggactgtaatttttggtatcaagagtaatatcggccacccgtcctaccactacaccaccaattttaaccggtgaactggctttcaggccgccaatattatcaaaagtggcatatatccggtaagtaggctgattgccaacagatttaatatccgccactttcaggcataaaaagatgattgccgctaaggcaatcacgataaataggcccacccagacttcagttttcttcgtttgcatcgactcaattcccaaacatcagtgctgtcagcacaaaatctaatcccagtaccgccagtgatgaatgcaccacggtacgggtcgttgcccggctaatcccttctgatgttgggattgcatcatacccattgaacagcgcaatccaggtcacggtaatggcaaataccagactcttgatcaggcaattcagtaaatctgtacgccaatcaaccgcgccctgcatggctgaccagaagaagccgctatcgatacctttccagtccacgccaaccacggagccaccccagataccgactgcgacaaaaattgccgtcagcagaggcatactgattaaaccggcccaaaagcggggcgcaacaacccggcgcaatggatcgatagccatcatttccagactggagatttgctcggtggctttcatcaggccgatttctgcggtcagcgcagaaccggctcgcccggcgaacaataacgccgtcaccaccggtcctagctcacgtagcaaggacagtgagaccatcatgcccagactggcttctgcgctataggtggtcagaatcagatagccttgcaagcccagcaccatgccgataaagaggccagaaacgacaataatcagcagggattgtacccccacgctataaagctgctttaccagtagcggtaactgcttgcgcggttgcgggcaaccaattatggcgttgaacaacatcaatcccgctcgcccgaacgtagcgcaaatattaatacctttgcggcctacggacgctaacgtctgtactaacatgaacactccatcagcctaatagctcggttttataatcgcccgccgggaaacggaatggtaccggcccgtcagcgatgccatccaggaattgacgcacccgaggatcgctattggtttgtaactgcttcggcgttccttcagcaataacatgctgatcggcaacgatataggcataatccgcgatgctaagcacttctggcacatcgtgagaaaccacgacgcaggttacgcccaacgcatgattcagctcatcaatcagcttaaccaatacccccatagtgattgggtcctgcccgacaaaaggctcatcaaacatgatgagttcaggatccaatgcaatagcccgcgccagcgccgcacgacgagccataccgcccgaaagctcggccggcataagatttgccgcaccgcgcagccccacggcttccagcttcatcatcaccgtgctgtgtagcagttcttccggtagatgaccatgttcgcgcagcggaaaagccacgttttcaaacaccgtcaaatcggtaaacaaagctccagactggaacaacatgctcatttttttacgcacgtcatacaggcgatgtctggaaagtgatggaatattatcgccatcaaaccagatttcaccggcgtccggagttagctgcccgccaatcaaacgcagcagcgtggtttttcctatacccgacggccccataatagcggtgactttgcccttaggtacggtcatgttgatatctgtaaaaatagggcgctctccgcgggtaaaactcatcctacggatctcaatcagattagacaccggctgattcatgcttatttatcccttcaggccgtttattacctatttaaccgccaatgctacagtaaatggagtcaataggtgtaacgcgtagcattcttacaacttatttgcgctttttcgtagccaaagtggccataagttttacttttccgacgcccacagtcaaaattagtgcattaagagaatgagagcgaaagctcaaacaaatgccctttcgccaacggaccggggattatacccaataaggactctgcatgtttcttgcgatagcattattaatcgttggcttggttttattggtgtacggcgcggatcgcctggtgtacggcgccgccgttttgtcccgctcgttaggtgttccaccgttaattatcggtatgaccattgtcggcatcggcacctctctacctgaattgattgtttcagttacggccgcactcaataaccaaaccgatatggcggtgggtaacgttatcggctcaaacattaccaatttgctgctgattattggcggagccgcgtttattcgcccgctgacggtaagatcagaaattctgcaacgagaactcccgttaatgttggtggtcactgttctgtgcggctttgtgctatctaacaattatcttagccaatgggatggggttattttactgactgccgccgccgcttttatcaccctgatgttgaagattgcccgtctggcgcacaatgaaggtaacgatattcttacccgcgagcaattatcagaattgcctcaggacagcagtaataccgtggcctgtctgtggctggtgctggcgtttattatattaccgctttccgccaaaattgtggttgataatgccacggtgattgcccgcttctttgggctgagtgagttagtcattggtttaacagtgattgccatcggcaccagcctgccagaattggcgacttctatagccggcgcactaaaaggcgaggatgatatggccatcggtaatatcatcggctccaatatttttaatatcgtgatcgtattgggcgtaccggcgttattgtctccgggtgcaattaatccggaagctttccagcgagattactgggtaatgctggttgtaagcgtcatatttaccctactttgccttgggcgaaaacaacgaatcggtcatctggccggcgctctgttattatgtggctttatcgcgtaccttgcggtgctatttttcgcccctttcagcgcagtattataaaacgagcgggaactgagtatgtcgaacgttgctttgcatccggatgtagattttcaacaggccggtaaacaggtattacagatcgaacgtgatggcctggccgaacttgatcaatatattaatgaagatttcgctcgcgcctgcgagaaaatgttccattgtcagggcaagatcgtcgtgatgggcatggggaaatctggccacatcggttgcaaaattgcggccaccttcgccagtaccggttcaccggccttctttgtacatccgggggaagctagccacggcgatttgggaatggtaacaccgcaggatatcgtgctggccatttctaattccggcgaatccaacgagattctggcattgattccggtgttgaaacgtcaacgcattccattgatctgtatgacgaacaatccaaacagcaccatgggcaaggccgcagatattcatttatgcatcaaagtgccgcaggaagcctgcccactgggtctggcgccaaccaccagcactaccgcgaccttggtgatgggcgatgcattagccgtcgcgctgctgaaagcccgtggctttactcaggaagacttcgcgctgtcccatcccggcggcgcactggggcgtaaactactcttgcgcatcagcgatatcatgcacactggcgatgatattccccacgtcagtcccgatgcttcgctgcgtgatgcattattagagatcactcggaagaatcttggtttaaccgttatctgtaacgacttgatgaagatcgagggtatctttaccgacggcgacttacgccgcgtatttgatatgggtatcgacctgaataacgccaaaattgccgatgtaatgacccgcggcggcgttcgggtacgcccgaatattctggcggttgatgcgctaaatctgatggaatcacgtcatatcaccgcgctattagtggctgacggtgaccaattattgggcgtggttcatatgcatgacatgctgagagcaggcgtcgtataaaggatatggaatgagtaacactgagtatgcggacacttgctacgggccggtaaccgcagatgtaatgcaaagagcggccaaaatccggctgctgatttgcgacgtggacggcgtgatgtccgacggcctgatttttatgggcaacgatggcgaagagctgaaaagctttaatgtccgcgatggttatggcatccgctgcctgctcacctctgggattgaagtggccattatcaccggccgttcagcaaagttactggaagaccgagctaaaaccttggggattactcatctttaccaagggcaacccaataagcttttggcctatggtgaactgttagatacactctcctgtcagcctgaggaagtcgcgtacatcggtgacgacctgattgactggccggtgatggcacaggttggtttatccgtagcggtggcagatgcccaccctctgctgctacctaaagcacattatgttacgcggataaacggcgggcgcggtgcagtgcgtgaattatgcgatttaatactgctcgcgcaggataagctggaaggtgccgaagggttgtcgatatgagtaaaacaaaattttggatcacgctaatactggcgttgattacgctgtcgctgattggctggaacttttccggatttaatcagaaagatcagaatattccagtcgacgataatgaaccgacctaccaaagtcagcatacggtgacggtagtttataatccggtcggtaaactcaattacaaactggtggcggaagatgttaaaaattacaccaccaaagaggtgacctggtttaccaaaccggtcatgaccatgtttgatgaaaatgccgtagcgacttggtcagtccgcgccgatcgcgccaaactgaccgatgacagaatgctgtatttatacggtaatgtggtcgtggacagtttaaccaccacttcgcaattgcagaaaatcaaaaccgataatgcgcaggttaatttgatcactcaggatgtatcctcagacgatgaagttaccctttatggcattgggtttacatctaacggcatgaaaatgcgtgggaatttgcggaacaaaaccgccgagctgattgaaaaggttaaaacctattatgaaatccaaaaataaaatgcgtcacctcctgattgccagctcgcttttggtcgcaagcgttccggctctggcattaaccggcgataccgatcagccaattaatattacgtcggataaacaagctctggacatgaccggtaataccgccactttcacggacaatgtgatcgtgaagcaaggtagtatcgaaattaaagccgataaaatggttattactcgtcccggcggcgatcaaagtaaaacggtgatcgaaggttttggtaatccggtgactttctatcaaatgcaggacaacgggaaaccggtaaaaggccacggccagaaactgcgttatgaagtggccaaagaattcgttattttgaccggtaatgcctatctggaacagctggatagcaatatcaaaggtgacaaaatcacctacctggtgaaagagcagcaaatggaagccttcagtgataaaggcaagcgagtcaccaccgtgctattaccatcccagttacaagacaaaggcccaaacgctaacggccaaaagaagagtaagtaaaaacttatggcaacattaatcgcagaaaagctggctaaggcttacaaaggccgtaaagtggtcgaagacgttagcctgaaagtgaattccggtgagatcgttggcctgctgggcccaaacggtgccggtaaaaccaccactttctatatggttgtcggtatcgttcaacgggacgccgggcgtatcgtgattgatgaagaagatatcagtctgctgccgttgcatgaacgcgctcgtcgcgggattggctatctgccgcaggaggcctctatcttccgccgcctgagcgtctataacaacctgatggccgtgctggaaattcgcaacgacttgtccggcgaacaacgtaaagagcgtgctgaagagctgatggaagaatttcatatcacccatctgcgcgacagcctagggcaatctctttccggtggtgaacgtcgccgtgtggaaatcgcccgcgcgctggcagctaatccaaaattcatcctgctggatgagccttttgcaggcgtcgatcctatttccgtgattgatatcaagaagattatcgagcatctgcgtgacagtggccttggcgtactgattaccgaccataacgtgcgggaaacgctggacgtttgtgaacgagcctatatcgtcagccaggggcacttaatcgcccacggcacgccgcaagaaattctggcggatgagcaggttaagcgcgtctatttaggcgaagaattccgcctttgatgtttgtttttttggttcgtgattcactaagggaaatcgccgtaatcctatgaagcaaggtttgcaactcaggttcagccaacagctggccatgaccccccaactccaacaggctatccgtttgttgcagctctctacgcttgagcttcagcaggagattcagttggcgctggaaagcaacccgctgcttgagcaaacggatgtccacgaagaagtcgacgccaaagaggttgaggagcgggacgatctggatacccgcgaagcccttgaacaaaaggatatgccggaagaactgccgttagacgcgacttgggatgaaatttataccgccggtacgccttcaggtatgggtaatgattacagcgacgatgaactgccggtttatcagggtgaaacgacccagtctctgcaagattacctgatgtggcaggtggaactgacgccgttttccgataccgatagcgccatcgcgacctccatcgtcgatgcggtggataacactggctatctcaccgtgccgctggaagatattctggaaagcatgggtgatgaaagcctgacgctagaagaagtggaagcggtgctaaaacgcatccagcattttgatcctattggcgtagcggcgcgcaatctacgggaatgtctgttggttcagctctctcagtatgcaaaagagacgccttatctgaacgaagccaagttgatcgtcagcgattatctggatttgttaggtaaccatgatttccgcacgatgatccgcttaagtcgcttaaaagaagatacacttaaagaagcgatcgcgctgattcagtctttggatccgcgccccggccagtcgatcaataccggtgagtccgagtatgtgattcctgacgttctcgtacgcaaagaacgcagcggttggacggtagaactgaacgcggacagcattccgcgcctgaaaatcaatcagcagtatgccgccatgggtggcagcgcgcgtaatgacagcgacggtcagtttattcgcagtaatctgcaagaggcaaaatggctgattaaaagcctggaaagccgcaacgaaacgctgcttaaagtagcgcgttgtattgtcgaacagcagattgagttctttgaaaacggtgaagaacatatgaaacccatggtactggcggatatcgcgcaggccgtggatatgcatgaatcgacgatttcccgcgtgactacgcagaagttcctgcacagcccacggggtattttcgagctaaagtattttttctccagccatgtgaataccgaaagcggaggcgaagcctcttctacggcgatccgggcattggtgaagaagttggtggcggcagaaaaccctgccaaaccactgagcgacagcaagctaaccaccctgctttgcgagcaaggcattatggtggcgcggcgaaccgttgcgaaataccgagagtcgttatccatcccgccgtccaatcaacgtaaacagttggtttgacccgaacagagaaggaagacactatgcagctcaacattaccggacatcacgtcgagataaccgaacctttacgcgaatttgttaccacgaaatttgccaaacttgagcaatacttcgatcgtattaatcaggtctatgtggttttaagcttggagaaagtgcaacaaatagcggaagcgacagtccatgtgaatggaggagagttgcatgcaacctcggaacaccaggatatgtatgcggccattgacggtctgatcgataaattagcccgtcaattaaacaaacataaagataaattaaagcaacattaagaacatgatgaccgccagacttatatgccatacagatttcaggatacaggaaggccgcaaaccaaagaaactcataaacttacatcactaagtgattgggtgaatgatagcagccaacaccaagtagtttgaaaaataacggatatatagtctaaagggaaaggttcttcactcactgtagccagtcgcgctacattacctgagtcggcgacatggattgaccagccgccgacatcaggagtgaaacagcgcttaagtgaaagatgagatgaccaacgatttagccatgcaattagactcggtattaaatatcgagtgcaccaaaagctccgttcactgctcgagtaaaaaacgggcactggaaatcatcagcgagcttgctgccaagcagcttaacttgccgtcacaggtcgttttcgacgctgtgctaacccgcgaacgtatgggcagtaccggtattggtaatggcatcgccattcctcacggcaagttagaggaagacacgctgcgtgccgtcggcgttttcattcgtctggatcaacctatcgcttttgatgctattgataatcagccggttgacctgttatttgccttgctggttccagccgatcaatgtaaaacccacctacatactttatctttagtcgctaaacgattagcagataaaacagtgtgtcgacgtttacgagcggcacaaagtgatgatgagctgtatcaaatcattacagaagttccggctgaaactcaatgataaagctagcttttctgccgtaacgctcttattttaccagtgatggattccggcctgtaagccggaataaaagtttctaattgtggcgcataacgccattgagatacctaggggagttgccacatggtgctgatgattgtcagcggccgttccggttcagggaagtctgttgccttacgtgcccttgaagatatgggcttttattgcgtcgacaacttgcccgttgtgctattgccacagctggcgcaaacgctcgctgacctgaacatctccgctgcggtaagtattgatgtccgcaatatgccggaatctccggaggtattcgaacatgccatggctcagttgccggacactttctcaccgcagctgctgtttttggatgccgatcgcaataccttgattcgccgctacagcgatactcgccgcctgcatcctctctccaataagaatctgtcgttggaaagcgctatcgatgaagaaagcgccctgctggagccactgcgctcgcgcgccgatctgattatcgatacctcggaaatgtcggtgcatgaactggccgaaatgctacgtactcgcctactcgggaaacgtgagcgtgaattgacgatagtatttgagtcattcggcttcaaacacggcttacctattgatgcagactatgttttcgacgttcgtttcctgcctaacccgcactgggatccaaaactgcgcccgatgaccggtttggatcgccccgttgccgccttcctcgatcgccatacggaagtgcacaattttatctatcaaacccgcagctatctcgagcagtggctgccgatgctggaaaccaataaccgcagctatctaacggtcgctattggctgcaccggtggtaaacaccgttcagtttatgttgctgaacagcttgccgactatttccgctcccgtggcaaaaacgttcagtctcgtcatcgtacgctggaaaaacgtaaataatgaccgtcaaacagaccgttgagatcaaaaacaagctgggcatgcacgccagaccggcgatgaaattgttcgaactggtgcaaagttttgacgcagaggtcatgctacgcaatgacagcgggacagaagccgaagccagcagcgtgattgcgctgctgatgctggattctgccaaaggccgccagattgaggtggaagccaccgggccagacgaagtgtctgcgttggccgcagtgatcgaactgtttaattccggcttcgatgaagattgatatcggctatttatgcgcgatatcagcctttggttaaaagagtatttggctctttgctggcgtcatcggctggagccttcggtttcaccgcctgattttactcacttctgaatgttttttactcttcgagatatcttcgccctgattaatttatcctcggccctggtcactctcttcctcccgcttaaccgccgtcgcaaaaccgctgcgtaataaaacccgctgggtaatcgtttgctaattgcaaaaaatgcacggtttaccccttgcagagaacgcaggcacgagtataattcgccacaatttgccgggagaatccatgaaaaacagcgagcgttttgttgaatatcatcagattgaaaatcgacaaaatcgtctgccaattggcggtcagctgccgtggtttctgccgttgccaaaccgatcttatcaggcccctcgttgaggggcttttttttgcccgccaaacggacggcgatgtcgaatgccaggcaaatagattcacgattttatattcacgctgattttatatttactctgattttacattcacgctaaagacacaccaggggcagccccatgccacgggctagcacagaggagagcgaaacatggccaatccgttgtatcaaaaacacattatttcaattaacgatctcagccgcgaagaactggaactggtacttcgcaccgccgccagcctgaaaagccatccgcagcctgaattgttaaagcataaagtgatcgccagctgtttcttcgaagcctccacgcgcactcgtctgtcctttgaaaccgccatccaccgcctgggtgcctccgtcgtgggtttttccgatagcagcaatacttcgttaggcaagaaaggggaaacgctggcagataccctctccgttatcagcacctacgttgatgccattgtgatgcgccatcctcaggaaggtgccgcacgtttgggcgcagaattctccggcaatgtaccggtactgaacgccggtgatggtgctaaccagcacccaacccaaaccctgctggatctgtttaccattcaggaaactcaggggcgtctggataatattaatatcgcgatggtcggcgatctgaaatatggccgcaccgtgcattcactaacgcaggcgctggcgaaatttaacggtaaccgcttcttctttatcgccccagatgcgttggcgatgcccacttacattttgaaaatgctggaagaaaaaggcattcaatacagcctgcatgccagcatcgaagaagtggttccagaactggatattctgtatatgacccgggtgcaaaaagagcgtctggacccatccgaatatgccaacgtgaaggcgcagtttgtgctgcgggcggccgatctggccgacgcgcgcgatcatctgaaagttctccacccgctgccgcgtattgatgaaatcactaccgatgtagataaaacgccgtatgcctactatttccagcaggccggtaacggaatttttgcgcgtcaggcgctgttggctctggttttaaacgctgaattggctctttaaggggaaaggtatgactcaggattacaaactacaggtagaagcgatcaaatgtggcacggtcattgaccatattccagcacaaatcggctttaagctactgtctctgttcaaactgaccgcgaccgatcagcgtattaccattggcctgaacctgccgtccaatcaactcggccgcaaagatctgatcaagatcgagaacactttcctgaccgagcaacaggcaaaccaactggcaatgtatgcgccacacgccacggttaaccgcatcgataattacaatgtggtgaagaagctgacccttagcctgccagatcgtattgacggcgtgctgacctgcccgaacggtaactgcattagccgtaacgaaccggtcgattccagtttccaggtaaaagctctgcgagatgaagtgttgctgaagtgcaaatactgtgagaaagagttcgaccatcaggtggtgatgcaggccgattaatccgggaagactcgctgtctccgccgcgacttactcagcggcggacactgtgaactaccgcaatcattttatttccttaggttgccgtaattcccctccgccctataatagcggtgattacagagtatccctttccgctttacgtaaaccaggagtcaacatgtcacgtattatcagcactgagcttgcccccgcagcgattggtccttatgttcaaggtgtcgatctgggcagcatgatcatcacttccggccaaatcccggttgacccaaaaaccggcgcagttgccgaagacgtttcagctcaggcacgtcaatccctcgaaaacgtgaaagccattgtcgaagcagcaggcctgaaagttgcagatatcgtcaaaactacggtattcgtgaaagacttaaacgatttcagcacggtcaacgcgacttatgaagccttctttgctgaacataacgcgccattcccagcacgttcttgcgttgaagtcgctcgcttgccaaaagacgtaaaaatcgagatcgaagctatcgccgttcgtcgctaatcccgacggcgtgccgatcacggctgactcacgtcagccgtgatagcttagcgtcgcatcagacactcccgtcataacatccctgtctgttcatcctccctgatttgctaattccttcataaagagagcatcctgcccttaattgcggccatagttataatgtatatataaatcaatacattgcataaataaaacagtttatgaataaagtagtttatggaaaaagtagcgctataatccaaaccggggcgttactttttaatccagtaaataccctcataaggtcgaagttccatcgcctctggatgaactggggcatcgtcgtaactgctcatcagcaatgaccaaccgcctaactccagattttctggctgccatcccatcggcttattgctaagattcgctaccaccagcaaacgtttatcctgccaactgcgtaaataacaccacaggctaggatgttctgggcaaagatcctgataatcaccgtaggtgaaaatatcctgctgtttgcgcaaggcaatcaggcgctgataggcgtaaaacactgagttttcatccgccagcgctgcgctaacgttaacttctggatagttgttgcacggcgagatccacggcgtagcctggctaaaaccggcgttagcactgttatcccactgcattggcgtgcggccattatctcgtgacttagtggctaaaatcgccaataactcatcggcctgacgcccggactcactcagttcagcaaacatattcaggctttcaacatcgcgatactgctcaatcgaagtgaagccagggttagtcatgcctatctcttccccttgataaatatagggagtcccctgcataccgtgcaataccattcccaacatcttggcggcagggacgcgcagcggtccttcatcaccaaaccgggaaacaatgcgcggctgatcgtggttacaccagaacagcgcgttccacgcctggttatgcataccctgctgccaagtggagaaaatactttttagttcaaccagatccggctcggccagcgaccatttttcaccgttcagataatccactttcagatgatggaaattgaaagtcatcgacagctcgccaccgtttaacgccgcataacgctggcaatgctctaaacgagtggacgacatttcacccacggtcattaaaccgcgaggctggaagacatcgcgactcatctcttgcaggaactcgtgaatgcgcgggccatcggtatagaagcggcgaccgtccccatcaaaatcgttggggaagtcctgctgtttggataccaaattgatcacatctaaacgcagaccatcgacgcctaaatcggcccagaactcgcagacttttttcagctcatcccgtaccggctggtgctcccagtttaaatccgcctgctcggtggcaaacagatgcaaataatattggccgctttccgcatgccactgccaggcattaccgccgaattttgagcgccaattattaggtagctgatccccttcaccgtcgcgccagagataaaattgacggtacgggctggccggatcttttgccgcctggaaccaggcatgttcagttgaagtatggttgaacaccatatccattacgatacgaataccgcgctgatgagcggcttcaaccaaggttttaaagtcttccaacgtgccgtaagccggatcgatggcacaataatcagccacgtcgtaaccgttatcaacctgcggagagagatagaccggcgtcagccaaatagcatcgacgcccaatttttgcagatagtccaaacggctagttacaccggctaagtcaccgtaaccgttaccggtagtatcctgaaagctttttgggtagatctgatagatgacaccgttttgccaccagggaatgggattattcatagcgtgaactcttattcatttaaaaaattgccccgtaatcggtacggggctcgacgcatatcagaccggtaattccccacggctgtctttgcgtttataaaccagaatagtcaggaacaatggcacaataatcgccaccagcatcgccaacgaataaatcgcccagaacttcggctgtatggacaaaattcccggcaaaccgccgacgccaataccgttcgccataacgccacttaaaccgcaaattagaccagcgataccggaacccaccatggcacacagcattgggaagcgatatttcaggttaatcccatacatagccggctcggtaacgcccagataggccgaaatcgccgctggaaccgaaatttcgcgttcgttaactttgcggctaataatgataatgcccagtactgcggaagcctgcgcgatattggataaagcgattaatggccacaccggcgtgccgcccatgctttgaaccatttgcatatcaatcgccaaggtcgtttgatgcaccccggtaatcaccaacggcgcgtacaggaaaccaaacagagccgcgccaatcggcgcaaagctgccggtcattaccgctttcactccccaagccacgccatcgccaatcatacggccaaacggcccaatcaacgtatgcgccaggaatacggccaataacagagaaacaaccggaacaataaccagatacaggtaagcaggaatgattttcttcagattgacttcaatccaacctaaggctagccctgccaaaatggagggaataacctgtgcctgatagcccactttctcaatggtgaaccaaccaaagttccatacctccggcagttgctgtcccagcatgtaggagttcatcaactgcggcgaaaccagcgtaatccccagtacgatacccaataccggcgtaccgcccatttttttcactgtagaccagcaaatcgccaccggcagatagaagaaaatcgcctcgcccaacagccacaggaaatcgtagatggttttccacgccggatgcgcctgcgccagcgtcattccgtcggacataggaatatcgccgatcacattgcggaaaccgaggatcaacccgcctgaaatcagcgccggtaacaacgggaagaagatctcggcgaaatgggaaataccgcgttcaaaccaggtcatgttctgccgcgccgccaacttggtttgctctttatcggcttcggcatgaccaatggtggcaatcagagccttgtagtaatcatcaacatctggcccgataaccacttgaaattgaccggcgttggtaaagcagcctttgaccatccgcaagttttcaatagcttttggatcggccttggccggatcgtttaagacaaaacgcagccgggtaatacagtggctgacagtggcaatattctccctgcctcccaccaatacgatcagttgatcgatgtcttgttgctttactttgctcatttcaacgtacctttcataaggtgggatcccgcgcattgactgaaataaacacgcgaataattaaattagtggctcattaaagattagctactgatttgtttttatgaaatgggaacgttcccaagctgtgccgaagatcacaatttaacggctttttttgcttacttaaccagcaaaaaaagcatcaattggatcgatcagatcagtttcccggggatgatgatctgctgaatagcgaggccattatttaactgtccgagcagttgctgagccgcttgaacgcccgcactaccataacctaattcaacagaaaatgagttaggaaacaggaagttaagcaaaggcgcgttaccgattccgcacacctgaatatgctgtttcccctgctgttgcaggtacttactgacgcctaaagcgatggtatccgaagcacaaaccagcgcagacgtgtcgggtttgatcacctgagctgcctgctgaaaaccactttgatagctgagctcacctaacgtcaccgttggggtcaatccatggcgctggcagtagttcaaataggattgatggcgacgcataccggtggtggcatcagagggttgtacgccgatatagctaatgtgctggtgaccggctttgcgcagtttgtccatcaataacgtcaccgcaccatcatcgtcataacaaaccgaagaaaaaccgggatattcacgtgctagcaccaccattttatcctgccacggcgcaagcatttcagcggtcaagccggtaaaaccaaatacaatcacaccgtcaacgttacgctggcgcaaaatattcaggtgctccgtaaccagctctgcatcaaactggctttccatcaagataggatcatagccctgctgataaaatagcggcaacatggttcgtaccgcctgattctcagaagcagaatccagacgcgaaacaataatccctaccactttatcgctctgaccgcgcattgcccgcgctgatttagatggcgtaaacccttgttgacggataaccgcctccacccgctcacgggtttgcgggctaacgctgccttcattattcaatacacgcgataccgtggatttccccacgccgctcatacgggcaatatctttgatcgtcagacggttttgcatggtttacctaaggtttaggttaaaaagtataaactggactaattatttatctttaccctgataatagaaaggttatcccgcctataatcaaaagtatgactcatgatatacccaataaattttgagccacactcaggccccaatagcgggaatccctgaaagcttagcccattaaatcgatgggttaagtaaaaatagccaacggcgctatggatcaaaaagtgaaaggtatcatgccgttagatacacagatttcctacctttacgcggagtgattctgtaaaggtttttgtcaccgggtggatgtcgcctagcgcctaccctatcttttgtcttaccggaggttaattacccagtggaccccgttccccaatcggccccctacggctggctctggtaaggtgatgctccgttttcgctgctgccttaccagaaacaatctggtaggcagtaacgtgtcatagattcgctcgttcctgcttagcaatatttttgccattaccacggcagttttgtcgtggatgtaatcaggttcagcataatgaaagtgaaaaacctcgcccggcaaatgcttaacgcattgagccgcagtctgccacgccgccttatccgccgcgaagctatgctggacggcttgccgcaaaaaggtgtggccaaagaacttcccgcagaactggcgcagcaacgcctgcactgtgccaatgaaacgccgcagcagctctatgaccgttttagcagtcatccggaggggctgacagagccggaagccaacgccattcgccaacgccttggcgataataccattgaaaatcagcaagctgtgccttggtggttacatctgtggcactgttatcgcaatccttttaatctgctgttaacgctgctagcgctgatttcctacgcaaccgaagatctgaccgccgcgttggtcatcggcgctatggtgctgatttccactctgatgcattttattcaggaagcccgctccaaccaggccgccgacgccttgaaagccatggttagcaataccgctacggtgattcgcagcgatgcccataccgggaaaagcgagcatcgggaaatccctatttcccaattggttaccggcgatatcatcaaactctcagcaggagatatgatcccggcggatctgcgtattttgctcgccaaagatctttttatcagccaggctgcgctgacaggcgaatccttgccggtagaaaaaatcgctaccagccgttatcccgatgaatctaacccattagaacgagataccctgtgctttatgggaaccaatgtggtcagcggatcggcgctggctatcgttatcggcaccggtaatcagacttatttcggtcagttggccgaacgcgtcactcatcaggatgagcagccaaatgcctttcaaagcggcatcagtaaagtcagttggctgctaattcgttttatgctggtgatgacgcctattgttttactgatcaatggcttcaccaaaggcgattggtgggaggcggcactctttgccctttcggtagccgtcggtttaacgccggaaatgctgccgatgatcgtgacgtccactctggctagaggtgcggtgaaattgtcgcagcaaaaggtcattgtgaaacgtttggatgcgattcaaaactttggcgcgatggatattttgtgtaccgataaaaccggtacgctaacgcaggataaaatcgtactggaaagccataccgacgtctttggcgccaacagcgaacgtgtgctgcattatgcttggctgaatagctatcaccagaccggtctgaaaaacctactggatgtcgcggttcttagcgcaatggcggaatctgcctccaccaaagcgctgctcgattaccgtaaagtagacgaaattccctttgattttgaacgccgccgcatgtcggtggtagtggccattcaagccgattatcacgaactgatttgcaaaggtgcgctggaagaaatgctcaccatctgcagccatgttcgtcagggcaatgaagttattcctttgaccgaaatgctgctgactcgtattcgccgcattaccgatgagttaaatcaacaggggctgcgagttgtcgccgtggccaataaaatcttaccggcgaatcatctggactatggcgtagccgatgagtccgacctgattctggagggttacattgccttcctcgatccaccgaaagaaagcactgaacccgctctgcgggcgctgaaacaaaacggcgtgaccgtcaaaattcttaccggtgataacgagctggttgcgcgaaaagtctgtaaagaagtcgggctttccgtcgatcaagtactgcttggtagcgatattgagcaaatgagcgacgaggaactgaccgccgccgcccacgctactacggtatttgccaagctgacaccgctacacaaagaacgtatcgtgcaaattctccgtaatgcaggtcatgtcgttggctttatgggcgatggtatcaatgatgcgccagctttacgggcggctgacataggaatttccgtggattctgcggtagatatcgccaaagaagcggcggatattatcctgttggaaaaaagcctgatggtattggagcaaggggtcattgaaggccgccgcacctttgccaatatgctgaaatacatcaaaatgactgccagttccaacttcggtaacgtattcagcgtgctgattgccagcgcctttttacctttcctaccgatgttgccgctgcatctgctggtgcaaaacctgatgtatgatatttcgcaaattgcgattccatttgataacgtcgatgaagatcagttgaccaaaccacaacgctggaacgccggcgatttggggcgttttatggtgttctttggcccgataagttcgatattcgacgtgctgactttttctctgatgtggtgggtatttaaggccaacacgccagaaatgcagactttattccagtccggttggtttgtagaaggtttgctgtcccaaacgctgattgtgcacatgattcgcaccaaaaagattccgtttattcaaagtcgcgcttcatggcctctgtgtttaatgacgctggcagtggtcgtggtgggtatcggtttaaccttctctccgctggctggtttcctacagttgcaggctctgccgctcagctatttcccatggctgattgtgattctgaccggttatatggtaacaacgcagttggtaaaaggctggtttgtccgccgctatggctggcaataacggtcagatagccagtatcccaaacagatagcaggaggttgaatatcctcctgcttttattctggcaacatgatatggggtattaaaaaatggctacgctctcttattttcgggattagatgcgccctaaacaatcgatcgcaatgcctttaaaactttcaaagttctggctactgagcagacggctcattgagcgttcacggacaaaggtaacaaacagatcgtagatagccatcgcttcttcataatcacttttactgattgccagcaggaaaataacgtaggccgtttccccttccccccacgcaattccttgcggagccaaaagcgttaccaccacggtctttttagccaacaggccaagggagtgaggtaaagcgattccttcccccagcatggtggaaacgatagcttcccgctcgactaccgaagggtaaaaatccgcatcgacgaaaccttcaagctctagttgctggcaaactttgctgaacaactgcgcctgagtcagcggttcattaacccgcacaaaatggttttcatcaaagaacttttccaacatataaggccgggtgcgatcgactaaaaccagttttcctaattgctccagctgatattccgttggaaaaggcgacatcaccactaccggcctatttttttccgttaaacgcgcattggagataataaaatcttcggcaatagtcgctatattttcatattcccgtagagataccgtcctagttaccacgatttgaggatacttgcgggaaatttgcgcctgaatcatacgaatcgtcgaatttccagtatcacacaccagcatgacctgcggatgacgctcataaccaatattataatgccgctctaaccctaccccgatatgcagtactaaatagccaatttcattttcactcaggctgtaaggggaatacttcccccaactggaaaccgcagccagcgttacatcataggccattgggtaatgctgtttgatattagataacagtggattagggatagtgatctgatacttaacccgcgtaatcatcgtcttgatatgggtcagcaaatcgatgcgtaattgcttatcatcctgcaaattatagttatagtgagagttaatatacgaaaggatgtaatccaccagcgtttcttcatcgtccgcgtttatttcgctgggctggctggtactaggctcgctgatttccatccgccgtgcggcaatattcacccgaagataagcctcttctgccgctgaaatctctttgccagccaatagctgtaactcattggccaaacgtccggaagccagttttaccgcttcatctacatcttcagcatcaaaatcagatagcggatagccttcagcgatacgttttaccgccaccgcacagtaaaaaatcaggtactgctcaccttcatcagacaatcgcacggcgtattgagacaataattggtgcaataaatcggtcagcgccggcatcgccgcatcgctaagaaaaacattttttaacagtgggttgtcgctgtcctgaacatgcagctgaaacagtaaatcggtcaggcaggaacgaatggctagctcggtgccaaacagcttcataccatagcgaggcttagcctctatggtcagatggtaacttcccagacgctctctcacctcagccatatcactttgcagcgtaccacggcttacaaaccattcatcagccaaatcttccagcttcaatgcaaaggctgaggtcagaaagcgaataagcaaatactgaacccgctcggcggcggtacgcggcgtcaggttcgtcttaggcgtttgctgctgcaatacctgaaaacgttcggcatcatcgatcattaatcgataaccaaatccccgattatgaataaaacgcgcaccatagtgctcaagaatatcgttcagcgcagtaatatcagctcgtaccgttcgggtcgaaacggcaaagcgctttgccagttcatcctgcggcagagtttcagattgcagcgcatcgaacatataagccaaacgttgataaggaaatctcactgcgcctctccgctgatgtagggcatttctgccgaatacaggctgctcctatcgggaggaacagcctgccagtgctactcttttgccaatggcgtaaaaatcatttgcgatggactacctaccggaatgtaaccaggaataaagctcaattttccgctgctttgatccaccttgaaccgggttatgttatcgctacgttgattcattgcgtacaggtagtgaccaccgggatctaaaaccaacgtacgcgggtaatcaccacgcgtccatacctcctcaatggctttgagatccccctcgccatttactgcaaactgcccaatgctgttatgcaaacggtttgccacgtagaggaaacgcccatcttttgacagtgttaaacccgctgcaaaattggttccacgaaacgcttttggtagcgatgacacactaactacttgttccaaagtccctttctgagtgtccagacggtaactggtcagcgtagaggcctcttcattaatcagaaatagtgcttttccattcggatggaaaacaaaatgacgtgggccagcgcccgcagaagatgcactgatatagggcggttcatttggtgttaatgcacccgttgttggatcaaaatgccattgatagatccgatccagacccagatcggtggaaaaaacaaacttcccgctgggatcgcaggcgatcatatgagcatgagggccgttatgatcgctggcggcaaaactaccttcaaccgcagcagccggtttagccgctcccgctgggccttcatcttgatgaacagagctggccgcctctatttttccatccgtagccaaaggaaaaaccgccacagaaccactgacatagttcgccacaaataaatggctccccgaaggcgtcagagacaaataaaccggccccgcaccttgcgcatcaacctgatttaacagagttaagccgccgtcttgcggatcgacacggtaggctgcaattgaaccgtgtttaccgccgttgtaatccgatacctcactggcgacatacagcgtcttcccctgagcgtccgccactaactgagccggattcgccagttcactaaccagcgttttattctttaattcaccggatgcaggatcgagctgtagtcgataaacgccttggccgttcgggttataggtgccgacatacgcaaattgcttcaaattttccgctccgctagatttttctgccccataagaagatggatgaaatcctgccaatagagccaaagaaaggccaaccgcaagtaaacgcggcggaatgacattagacgcagggtatgtttcagagaggaatggcctgttacgcatatttttcccttatcactatgacgcgaccagggtatgggtctagctaacctaacatccagatttacaggtaaaaacagcctacaccacacccgataaagaatgaggcatctcagcgatgccccttctgaaagcttatgccacgattctttttactatgttcagcaacgtgataacgtcctgcgggcgtgtatcacccgtttcgctatcgataattgaactatagatatgaggaataattttgctgactccggcatcgagagcgatctgtaaaattgtctcaaaattctccagatcgatgccgcccgtcggctccagccaaaaatcatgtttggcgcaggcctcggccacacagcggtattcctcaatgtgttttaacccacccatcgggaaaaacttaatcgagctgccgcccatatctttcaacatggcaatggcggtttctaccggaacaatcccatccggcgcagcggcgctcagtgggccagtggatatcttcacgtatcccacttttccagtcggtgaaatcaatccattcactatggtttcccactgaccaagcagcgcccggcttgggcctacgccggtaaatacctgattaacatgctgtggctgcacctgttgagcaattaaactcaccatagcggattgatttgggtcccctgcgccaagccctactgacagcgcattgtctatccgttcagcatattcgcgcatatcgctgaccgcactttcaacgtccggatagtttttagataaaacaccaaccaaaacatgaccttcagccgcctgccaaatagcctgcgcgttggatttggaacccgctagcacattgaggcaaactcgatttcggtaataattaggggtcaatttcatcgattaatctccctgaaccaagcgttgaatgcaggtagaaatgacctcaagctgtgctgacgtgacactgcgcacgtccacctcaatcttgccttcatttgctttgtacgcgcggaaataaatcgccggatcgccgtccatcaaagctgcgaccaactctggcgttgaacgcccaattttgacttcgtcgaagctgatttcggttcgggcaatatcccggccggcactatcccataccactttggcggagataccgggcaaagcattcaaatgactgataaatggcgtcattttttcaaccatttgctggccggtggtctgttcctgttgaatatagctctcgatagcctgagtcaggccaataatgctttccttacccactttcatcgcccgaccaataccattcgactgtagcttaacccaatctacgtaggtctttttgcccaagactaacccgctggttggcccttcaattgccttcgcgccactataaatcactaaatcagcgcccatctgatagtagcaggccagatcttcttcggcggccgcgtctacaatcagtggcagttggtgcttacgcgcgaccacaactgcctgttcaactgacaaaatgcttttttgtacgcaatggtgggattttatatacaaaatcgccgcagtattcggcgtgatcgccgcttcaagctgatcggcagagcattcattggcatagcccgcttccaccactttaccgccaccgagggtcaccatcgtatccaccggggcgccgaaattaacgttgtgcccttttggcaacacgatctcatgggggacttgcaacaccgcagcttgcagattaaccaataaattggcgttatctttcacgataacggcagcaactgactgcgcaattcctgccgaagcgcaggaaacgaccaccgcactttccacattcagtcgctctgcaatataagcaccggttttattcaccagatctttaacttcgaagaagtgatttagcccgaatgcaacggcttcgaccacgtcctgccgcggtgtagaaacgcccaaaatcgtcatccgaccggatgcattaatcacgctttttagctggtacttttcatagatcgaagacatcgtgagatttcccttcgtcagttaacaccaagtcaccggcgacaaccgcagccaatggcagcaaatatttctctccggttacggatttaccttctgaatcgacaaatacttgaggccgttgtttcacttcgaatatagttaaatcggcatcaaagcctgcggctaatacccctttaccggtcaaacgtaatgcctgcgcggcattttctgttacgcagcgaataacttgttcgaggttaagaccaatggtaaagaatttagacatcaccgttgccaagctgtgcaccggcccggtaatacggttgcggcagtaaatatcagaactgatggtgtgagggtaaattccctgtttaatcgcctgctcagcaacatcgaaactaaaactggcgctgccgtgaccgacatccaataacacaccacgttttaatgcgcgttgaatagactcccgcagcgtaccggacggggtcaaaatacggttgggtttaccgttatagcagtgggtaataatgtccccttgggtcagcaaatcggcaatttcatctagatccggcggattattgccaatatgtaccatcaaaggtaattggttattttcttgctggatttctttggctcgaaccaaaggcttaatgccgtttttccccacgacgctactgctcatccgagccttaatcccaataataaagccgggattgcgagcgattgcctcgcttacgctggatttatcgatctgctccatatcggctaattcgttttgcgtcacaatgccggttttagcgatatttaaaaacgcgtaaacctgtgttttcgccgctcgcgtcaaggtataaaaatcatccacgtcattggcaccggtactccccgcgtcaataaccgtagtcacgccgctggccacgccaattaaatccgcatcatcatgataaattggcgaagctgggtagcaatgaacgtgtgaatcaatccagcctgcgctgacaaagtactgccccgccaaatctatggttgccttggcagaaagaaaatcgataggattttcattacagagtgaaactgaagtaatcttgccgtcatcaataacgatatcgacctgatgcccttcaaccaaccttgcccgtttgataataaagtcatgcattatctttattctccgttaaatatccgggtaacaagatgtgagtggctaaatgatgatggggcaaaattgatcatttaatttcgccccgtaatatcaagaaatagcgaccgggaatagagaacctaaaatcatcgcgcctaaaatcgcaccaccggtaattggcttgctccataaatagaacaataatgcgccagccaaagaaccaataccgataggaatagaagctgccattgcagaaagaataatcaagggtccaagaaaacgtccggatgaattacctgcgcccatcatgacatccgcgccgtaagttgaatcactctgattaatggtgaattttctagccagaataataagataaccgatagcaatgccaataactaacccagtgaccagtgaagctgcaaaattggctacggggaaaacaaatccagcgcccaataataatgcaggaacccccaaacctactccggtttgaatcgccccaccaatatccagaatacctaccagcgagccttcgataatgcgtgcgaataagaagctggcaccgaatgctgctactgcaccataaacgccggtatccatacctgctcgcaacatggaaacgaaagccacttcgttaaatgcgccaatcccatagagataatacatatgggtaccagcaaaaacgccggaagataatacgccaacaaatatcgggaatgaccagtcggcataccaaaaaccgtctttggtttgttcatccatcatcaagctcctgtagaaatgttatttaccgcttaatgcgttatgaatgctgtcgagccagactggaacgcccagactgaatgactccaggaatttcatgtcaaagccacggaagaaaccgctcaaaacaaacagtaagacaataactgccatcatgatttttgtgactttattccaaccgctttcttctacgcctttaccgattaaaatacccagaaccagacctggaacagcgttccccataattaactgagccagaccgccaaaaatagtggcccagaaaccggaacgacgaccggcatcaatagccgccagccagaaaataaccggcatcacggtattcaccagaatattagccgccggtaccaatactttaattgcggtaacctgcaatgcttccggtacagccgaagcggtggtatttaagaagctaacaacgataacgccaataatgccgcaggcaatcgccatttttttcgggttatgcatggtctcggccacattgcgatttttaatcatcaatgctgctgcaccccagttaggaataatgcgatggtcaacatcttgcgtaaacgcacccgccgcaacggaagacgcccatgcgttaaagaagaagcccaaaccaaaggagaaatgcgaggctggatcgccttcacaagagttcagttcacccaaggtacgaaatgcgcccatgccctgaaccgtaggcgcatgaaacattcgcgctgcaccggcaccgacgccgacaccaaccagtccgccgatgataatcgacttaaaaagaatgattaaaaacatcagtatatcctttcatttatagccaacgtttttatttagagacgaaaacaaccttatctgtattaatgattgttacgctcacggtaatatctaaggctacggtataagtcctcttttcgcggggaagaaagaagaacagaaatttctctttttttaccgactcttccgcgcttaataccttcacgtcctggggttcaatgcgtaataagatattttgtgtcgacttcaataccgtattctggacatgacctaatgcgctggcgaaagccttagctttagtatcccctttccctttgaccttaacctgggtggtatattgttctttcattacggattgccatgtttcttaatataagcttcaaccagtttctgaccgagttcttctttatccataaaaccaaaacctaatactttacaaccttcatttattgccgttacgccctcttcaatagagcgcattccgtatttcgctttatagccatatttagtttgtgccgtaatagcgcctgcgccaccgctgccgcaaaatgaaataccgaggtcagcctgttctttattcatcacatcgcccaatttcatatctgcggcaacgccaggaatcacaatagattttgccccggccaactcaataccctgaccgactttctgacctttacccaaacggtcgccaatcacaacggtaatttgactcataattttttctccaaggctgaatttatgaattattatctttggctacttcaaaatgcacggacaataaataggcttcctcaatgggcaaattccccaatgaatcgactacttgctgagccattctcattgaatctgctgatatttcgtcaaataatgacttatccacttccggcagtggttcaccagtaatagagcgcagcaccatagcccgaatatgtgaggtcaacatctgctgctgaacatcattggtataaatattctcggcattcagcatggccattatatccgccaataaccattgagttttctcaatgccatcatcgacatcgagtttattctcagtatttacagatacggctccatcattcacgctagcgttcctctgtactgtgctgatttattttctgactgcaaagaaaagttcatggcgttaaatcttattcctttcctttacgctatagccttaccctacccctaagcgtaaaaagtatgtagcctgtttttttccagttcgaagtggaaataaagtgagcaatattgatccaattcgcaaaatccgcggtactgggccttcccagtgaattttcacttttttaaagctagcgctatccataaatgtttataaacgataaaacagaaaaaaacgccgaagaaataacaggaaaatatcatgcaaaatcttagaacttgcgatgattcagctattttataagaagattaaatagggaaaacagggtaagagaataaatatccttattttatttcagcataaaaaatggcaattatggaaaataacgagatcaagatcaccttttatcaaaagataaagcaagaaaagcttcgtgatccggatctctttcttttctcgccagaagcgcctagtatcagactaataatctgatattttctaacaccccctctcctatggcgcgggggtgttgtttttatgttttctgtacttgaattggagagtggtatgaccaagccaaccatcacgattaacgagctggacgccgaacgtttggatgcgttgttggcacaacctgcttttgctgacacagcgattgccgatgcactgaatgaagagctggatcgcgctgacattctgcctccgtcagaaatacctgctgacgtagtcaccatgaatagccgggttcgttttcgtgatttgaataatcaggaagagcatattcgcacgctggtctaccccgcatcgctgaaagatagtaacgaacaaatctcggttatggctccgctcggcgccgcattactgggattacatgttgataatgagattaactggaaactgccgggtggggatgaagcccgcattaaggtattagaactgctgtatcaaccagaagccgccggtgaatatcaccgttaataccttcgcgttttagcgatgaagggtggtagatcgtcgatctctcacccttttatgcatcaagtgttaaatccatttacttctcaatactctttattccttaagcgcactcattatttagcctgactcattctttcaagctatagcatcttaacggtattttttatggtaagtgttgcgggtgtctttgaattcctgcgccacctttcgcgcctcttccagcttgccttgatcggctaaagccagagattgatcgatttgaccgatcagtatggttaatccatgacgataatcttgtacttctgcgctatctggcgccttgccctttaatttaggcggaatgcctttctgcgcatccaacgccgcgctgcgcatcccctgtaggccttgtttgaagctttccagcgaatcggttttcagaaccgcactgtaattgctcgcaatggtatccatatcttccgcaatatcatttgccattgccaaagtgctagcgcttagcagtatggcggccactaacacttttattttctgactcatgctcacgctccttataattattgttaatagtttgtatcactcataacataggtggctagcagggaaacaggcaatagaatttttgtaaaacactgaaaatttaatggtagcagcaatgagacataaaaatggccgagggcattagccatcgaccattttactacagatttttatgccacaatatttgaacccattcccgctaatcgagcgtgattaacgaaaaaaatccaaaggattattcaccagcaattttcatttctggaagtaatattgaaccgcactgaatattactgcgtgtttcaatatcactgcctgcgctaaccatattgcgcagcatgtctttaagattacctgcaatggtaatttcactgaccggatactgaatttcaccgttctccacccagaaaccggcggcaccgcgagaataatcaccggttacggtgcttacgccctgacccatcagttccgttactaccaggcctctgcccatcttcttaagcattccggcgaaatccagcccttgcccagcaatacgccagttatggattccgccagcatgaccggtgcttttcagacccagtttacgcgccgaatagctggtaagcaggtaggtttgcagaacgccgtctttcacaatttcgcgacgctgggtacgtaccccttcgctatcaaaaggcgtagaagccaacccgcccaacaggtgcggatgctcttcgatggtcagccattcaggcaaaatctgtttgccgagatgatcgagcaaaaaggtagatttgcgatatatattcccgccgctaatggctgaaaccaaatgcccaaacaggccggtagcgacttctgcagcaaataacaccggagccttcatagttggcagtttacgcggtgacaggcgagacagggtgcgacgagcgcactctgcgccgacccactctgggctggccagatcttccaaccggcggctgatgctgtaagcgtaatcacgctccatatcaccgtcaaactctgcaatcacgctactggatatcgaatggcgacttgagcaataacttttcagcataccgtggctgtttccgaaaaccttgatgccatagtgactgttaaaactaccgccttcggtattggtaatgcgcttatcggcctttaatgccgcctgctcggctctagctgccagttgaatgccgcgatcggcgtccaactccgcgggatggaacagatccaactccggcgcatcaaacgccagcaaggatttatctgccgggcctgcataaggatccggcgaagtatagcgagcgatatccaacgcagcctggacggtgcgggccactgcgtctggattcaaatcagtggtggacgcgctgcctttccgctgctggtgataaacggtaatccccagcgcaccatcgctgttgaactccacgttttccacctcgccaaagcgggtgctgacgctaatacccgtagttttagtaacggcgacttcggccgcatccgaactggcgcgagccagttccaaagcttgtgcaacagcttgttccagcgttttacgctgttctgcaacttgagtgactactttcatcgatctgccataattaatgagataatcgttcaggaaagtgccgtgacggcgtagtaatacgacgatttacacggataaaatgtagagcgccatggctttgagtctaacaggatctgcgtacaatttcgcagaaagccaacaacctgataggattagcctctttttaaggaatgacaccatgaacaaacagcccgaagactggctagacgaagtcccagaagataaaaatgaagatgatgatgagattatctgggtcagtaaaagtgaaattaaacgcgatgccgaagcgctgaaagatctgggcaccgagctggtagagctgggcaaaaacgcgctggaaaaaatcccgctggacgaagatctgctggctgccattgaactggcgcagaagatcaaaaaagaaggccgtcgccgccagatccaattgatcggtaaaatgctgcgcgcccgtgatgttgaacccattcagatcgcactggataagttaaaaaaccgccataatcagcaggtttcgctgttccataaactggaagtgctgcgcgaccgattggtagaggaaggtgatgacgcggtgcctaccgtgttggatctgtatcccgatgccgatcgccagcaactgcgtagtttgatccgtaatgcccagaaagaaaaggcagccaacaagccgccaaaagcattccgtcaaatcttccagtacctgcgtgaactttccgagaagcagctatgatcggacggagccgggagtctgccacagaccccggttccgactaacaaatattaaagcgtaaactgccagacaattcttcttccgcctcttcgaacagtagaataatcgcgccaaaacgccgtttccggcggtgattgagatgaataaactcaatttccaccggtaaactgatagctccggttaccgtatcccacaatgcatccagattggcgccgaaatcttcgcccaaagaaaacttctgcgaaaaatcgtgataaaatgcgggaagatccgcgatatggtcaaaatcaaacgtcactttcaccatcttctcactccacccgaacaaaattcttataatgatcctgagtcagataaatcaggccatcattggaatagagcagccgatccgttccccgatggccacactgatagttgacgtccgcttcacgccatatccgattattcgccttgggtaacgaaccttcacggtttgaaaaacgatcgccaccgatagctttccccggtaatacctggcataaattgccgtctttcggattccaaccttgctcacgcgcctgctttttcgtgatataaaaatccggcaaccggttgttttgttttaggtatttcaccactttttcatgctgggtcagttggtcgatagagtcagttcggctgactttattactctgctgatggctacgcgtctgctcctgactatcggcctgcgctatcaccggtgttgacgtcggcacagaggccggcgctgttccccgctcgtttccctgaatgaccgcgacaattaataccaccgccgccgccagaattcccaccagacgtttgttcatgattttccaaatcaatttgctcggctaaaaaagagagctgacgccgatgagcgccagcgcttttccgttgatttattggctataaattacctaaatgtaaggttttcacttccataaactcatccaaacccagcaccgaaccttcacgacccaaaccagattctttcacaccgccaaaaggcgctaattcagtagaaaccgaactatcgttaatgccgatcatgccgctttccagcgtctcggacacgcggaatactcttttcaaattttgagtatagaagtaagccgccagaccgaaaggtgtgttattcgcgcgctcaatcacctcttcttcggtcttgaaacggaagcaggctgccagcgggccaaaagtttcctcacttgctactttcatctcttcggtagcctcggcaatgacagtaggctggaagaagttgccacccaatgcgtgacgttcaccgcccgccagcagacgcccgcctttcgccaatgcgtccttgacgtgatcctcaactttttttacgccagcagagttgattagcggccccaggtttaccccttcatccatcccgttgccgactttaagttttttcacttcggcagccaaacgggtgacaaactgttcgtaaataccatcctgaatatagaagcgattgacgcagacgcaaacctgaccagcattgcggaatttgcaagccatagctccggcaactgccgcatccagatcggcatcgtcaaagacgatataaggcgcatttccccctaattccatcgagattttcttcatggtttctgcggcgttgcgcattagggttttgccaacctcggtggagccggtaaaggaaattttacgcactttcgggctggccataatgacatcgctgatggcgtgagtgtcgccagcaacgccatttaacacgccggccggcacaccggctttctctgccagagccagcagtgcgaaagcagaaagcggagtgttattggcaggtttaatcaaaccggtacagcccgcggctaacgcaggacccagcttgcgagttagcatcgccagcgggaagttccacggcgtaatcgctgcgactacgcccaccggttcacgagtggcaaagatacgcgcgccggtttttgccggaggaataatttcaccgttggcacgtttagcctgctcactaaaccactgaatgaagctggcggcataatctacttcacccaaagcttctttcaagggcttaccttgctctgcgaccattaattcggccagatactgacggttttcgacgataagctgataccagcgctgtagaatctcggcacgctgtttggccggcgttttacgccaggcagggaaagcctcatgggctgctttgatcgccgcctcggtttcacttttaccggctttagccacctgagccaccaattcacccgtggctgggttcaatacatcaaaggtttctgcggcctgataccattttccaccgacatagtagccagttttaaacaattcatgtttctgtaacggattatccagatgtgttgaagcggacatctttaggcctcctgatcggcaaagggctgcccacaataggcaacgaggaaggggggagcgtgagttgagtatagcccttgatggtggcaggaaaacaggctccctgccgccaatagcttattgaatgagcgcgtgctggtatctgtgcaacatatctgcaagacgtttgaccgtttgagtaacagagacaggagcatgatattcaaccagtttttgctggtaatcacttaattcctgtagcagacggaaaaagtagtggcgtcgcttttgctcgtttttcgacgtcatcacccgatcggcggtatggcgaatctgtttatggaaggcgcttaactcggcgttgactggaatctcggtattattcagcctttgatgagcgacaatcagcaacagagccaaacggtacttggcgatatcaccggggaacatcatcagcaattggttgagctgctgatataacgctggcaaatggttatcgctgcggcgggcttggttagtggtcagagccgccaccgcgctgtacacaaaacggttgagcaacgttctaccggtacgcactttagcgttatcacgaatcagcagcagcacgatcagagaaacaaaacagccgaccatctggccgagggcgctatccagaaacaggctaacgttgaattccatggggttgctgagcaccaaaatgttaatagtacccgccagcgtgcccaaggagcccagccgccgtttctgcacttccacgccgataataaatgccagtaaccccaagctaatgcataacagcagtaaactttgctgagtcgaaggcagaataaacatgaagtacagcgctcccatcggcaacgccattaacataccgatgagaaagtccatcgccaccatgcgcggattgggcgttcgcatcgccagagaggttacaaccgctatcatgaccatacagcccgcccccgatgtccagccggtccacaaccagaacaggccgccgatcgcagtagcaataccggtgcgtaggccattgatcatcgcgtgatggccctccgccgaggtgtgttttatttcaggctcggtggttaacagctcttcttcaacgctgctaatactgctgttggtatgaatgcccttcgccagcaacaaatagcgagtggcggcaccaacccagctactgatggtcaaaggcacggcactactgtgactacccgcgaaatgctgacgtaacactttcatttgcttatgaatatcgccgcagttatctgcgggtgtactcagtagcgctttcagttcatcggttagataatcaggatgattaatcaaaatcaaataggtttcacaggcctgagtaatcatagcgagggattggccgtgtaacgcctgtaagcggcgatcgcagcgctgccagcgtgaggattccatcatcagatagctacgcatccctttcaatgcactggtatttttcaccaaatcattccacgcacggtcgatatcttctttatccgcagagtggatgcacaaatgcagcaggtgatactgatccaccagcagtttatcgatcagtcgatcgatatcctgtttgatggatcgcggagaaaacagcagatccgcgatcaccgcacagacgatccccagcacaatctcgctacagcgttccaccgcaaactgcggcgttagcaacggcgtttctccggtagtcacaatgatgatcaatgcggtgtagccagctagaccgaaagcgtaggaattctcgactttcaccagcgaggaaatccaggtacagacaccagcccaaacacagcacagtattagcgtcagtaccggtgctcttatggtcagaacgataatgatcaggccaccaatacagccaatgaatgtgccaataatccgcagccagccgcggtgacgaatagcgccggaaaaaggttcgccaccggcagcaaaggctggtccagcagcaacaatcgccgccgtcatcaccgaccaacgcggagtttccaactgaaaatggaagcccagaaacagcgccgctataatggcaaagctcagtttgaacgcaaagcgatagcggataaacctttggctagtgaacatacttccccttagccgaactcacgcaggcgatgcattagctgaatcaaacccgaagcatggcttggctcgcgaccattcggcccggtaatcactacggtggcagtggtgcccgcaggatacggatgctgttgatcttcctcatctaaacgaacttttaccggcacacgctgagctaaacgaacccattccagattattatcgatcgtcgccagccccttactatcggccttgctgctgctgttagtcacccctgcggatacgctatcgacggtgccgtgcataatacgatgactacccaacggggtgatttcgacgcgatcccctctgcgtacaccttccagcttggtttcttccagataggccagtacgtaaaacgtgtcttttttcactagcgctaccgcagtagcgcctcgggtaataaattcaccagcatgaacattcaagttagtgacccaaccctgagctggcgcacgcaccgtggttctttccaaatcgagttttgccagatcgcgcaccgcgatggcttttgccagttggtgtctgacggtttgcaacacgttggtggactgatcgatttcttcctgtgacaaagcctgcacccctaaacgcagacgacggctggactcacgctgtttctccgccgctaatgtttgatagtaggccacatcggcttcggcactggccaacgcctgctcgtaacggggacgatcgataacaaacaatacctgacctttttctaccaattggttatccaccaccggcacatcggtaattaaaccgctgacgtcgggcgcgatggcgaccacgtcggcggtaaatttggcatcacgagtccagggggattcggtataaaacgcccagattttaaaaatggccattacggccagcagtaccacaaccaaggtgataccgattcggattatttttatcagaaatgtactcacggtaacctcaggaaaagaaacgagacgttaaataaaaaaggcaacagaacagcgccgtattaaacaaagccgggtgccagacaaattcataaatacccgtcggctgtaaaacccgacgcagcagaaaaaacagcgccagagaaatcagcaactcgagaaatatcggtggaaaagacagaccgaaaacaaccatcaccggaagcaaactcattcttttatccttattttttgggtaccggttggtttaccctaccgctggatttataccgtcgagtgaaaggtcaccgttcgctcgaccgatcgcggcactaacctgaaataactatcaggtgcctgaagtgttaaacttgctggtatctgtcagaggaaggtgcgaggacaactgaggcggtgcgtattaacaccgaaggttatttctcccgaccccttatattagcctgcttattatcaactgatctacaatctgtgatctaaatcacttttaagccagagttaacaattcattcagagagaacaatggaacgattaaaacggatgtcggtttttgccaaagtcgtcgagtgtggttcctttaccgccgccgcccggcagttaggcatcagcgtttcttccatcagccagaccgtatccaaactggaaaatgagctacaggtcaaactgcttaaccgcagcacgcgtagcattgggctgaccgaagcgggtcgtatctattatcagggctgtcgccgcatgctacaggaagtgcaggaagtgcatgagcagctctatgcttttaataatacgccaaccggcacattacgcattggctgctcctcaaccatggcacaaaacgtgctggcaaccatgaccgcagatatgctgaaagcttatcctggcctatcggtcaatttggttaccgggattccggctccggatctgatctccgacgggctggatgtggtgatccgcgttggggctttgcaggactcaggcctattctctcgtcgtctgggatcgatgccgatggtggtttgcgccgcaaaaagctatctggctcaacacggtacgccggagaaacccgcggatatggcgaatttttcctggctggaatacagcgttcgccctgatagcaacttcgaactgaccgcaccggagggaatttccacccagatatcgccgcagggacgttttgtcaccaatgattcgcaaaccatgattcgttggctcaaagccggagccggtatcgcctatgcgccgctgatgtgggttattgatgaaattaaacggggagatgtggaagtgctgttcaaccgctaccattcagaaccacgaccggtttacgctttgtataccgaaaaagacaaaatgccgctgaaagtgcaggtatgtattgattatttgacggaatacttcaagcgcgtggctgaaatttatcaaggataccgctgagtaaatctggcctccacaagcgaggaggccagcgaaaatcaggccgtgccgccgacggtcagattatccagtttcagcgtcggctggccgacacccactggcagactctgcccttctttaccacacacgcccacgcctttatccagcgccagatcgttgccaaccatcgaaatttgctgcatcgcctcaatgcccgaaccaatcagcgtggcacctttcaccgcgttggtgattcggccattttcgatcatgtaggcttccgaggtagaaaacacaaacttaccggaagtgatatcaacctgcccaccgccaaaattcggcgcatacagaccgtattccacgctagcgatgatgtcttccggcgtggatttaccagccagcatgtaagtattggtcatacgtggcattggtaaatgcgcgtaagactcacgacggccgttgccggtcggcgcgacacccatcaaacgtgcgttcagcttatcctgcatgtagcctttcagaatgccgttttcaatcaatacgttgtattgacccggaacgccttcgtcatcgatagccagtgagccacggcggccttgcagagtgccgtcatccaccacagtgcatagctctgaggccacgagctgccccatttgaccgctgaataccgagctgccacgacggttgaaatcgccttctagaccgtgaccaaccgcttcgtgcagcagcacgcccggccagcctgcgcccaatacaaccggcatagcgccagccggagccgccacagcgaacagattcaccaaagccatacgaacagcttctttggcataggcgtcggcacggacatccccatcaaccggttctaagaaatagtcatagccgaaacgaccgccgccgccgctggcaccgcgttcacgtttgccgttgtcttccaccagcacactgacagacaaacgcaccagaggccgcacatcggcggccagcgtgccatctgtagccgcaaccagaatcaattcatatacgccggtcagactggcgctcacttcctgcacccgcgcatctgcggcgcgcgccactttatcgacccgatgcaatagcgcgattttttcttcacgcggcaagctttgcagcggatcgagcagaggatacagcgaagcgtgggcaatctcgcccaaggtgtgaactttaccgttcccattatcacgcacaatactgcgggcagcctgcgcactttggtgtaaagcattcagggtaatttggtcggcataggcaaaaccggtcttttcaccgctgaccgcacgcacgccaaccccttgatcgatattgtaagagccatctttgatgatgctgtcttccaacacccatgcctcgtgatagctggactggaaatataaatccgcataatccaggcggcgttcagccaactgacccagaactgaggaaagatcctgatgggtcagtttgttagcagcgagtaactgctcactgacaaacgagaggctcatattattttcactctttattggatgaaacttcattgaatggcggcaccagacttggctggaagcgattatgctgcatcaccggcatctgcttacgtattttttgcaggccattagcctcgaccctcactttcagggcagaaacgttatctggattctcgattaataccttgccccaagcgtcaacggccatcgaatgaccccaggttcgacgggttaacccatggctgccaacctgtgccggcgccaatatcatacattggttctcaatagcccgcgcccgcagtaacacttcccagtgagcttcaccggtaacccgggtaaatgccgccggaacggaaataatttccgccccttgcgcgcgcaacgcctggaataacccagggaaacgcaaatcgtaacaaatggtcatgcccaaacgcccaaccggcgtatcgactacggttagatgctctcccggctgataggtatcagactcacgatagtgtccgtgtgtatcattgatatccacatcgaacatatgaattttgtcgtagcgcgcctgcaattcaccctgatcgtcaaacagcaggctgctcgtggtaatgcgatccggagactcacggctaatcatcggcatcgagccaaccagcagccagacgccgtaacggcgcgccatttcacggatggcctgctgtaacgggccatcattgtgacgctcggcctgtttacgataagccgcagaatcggcaaataacagcgcattttctggcgtcatcaccaatttaatgcccgaattcaactgcttaatctgttgctctatctgagctaggttagaacgggtttgctcaccgctacaaagctgtaaaagtgcaacattggcatttttcatggtgccttattctcctttagctggcgtaacacctcatggatatccggctgatccagactaccggttatctgatatcgaatcagagatattttactccacaacggcccgagcactttggtggccgcaaaaaccgccgccccaatcaccgggttaatcacaaatgccgtagccacaccgacggtcgcggatatttccggcgtaataacggcttccatgttgatttggcgtttcaccaaatcaacactgccgttcatggcgatatctgccgccagaccgtcgatcaaaagatcgttagtatgcaccacgccagatttcacgctggcggtgccgcgaatcgaatcaaaggcaaagtcacggctgaaggtatcgctgaaatccagctgtagtttacgcaacaatgcgtcgaagctgaccagccgcagcagttgcccggcgcggcctccgcccagattcaccatggcacctttgcttagtttggcgctcaaattgccattaagggtttcaattcgcggctgccaaggcacgccctgccacgccagcgttgcgttgccgtcaaaaggtgcatctttgagcggcgtgctaataccgaagaatgacagagtgtcatcgattttactgccagaaaccttcatcctaaccgacgtgttattgccttccgcactttgctgccattcgccgttaaccgccatgtgagccttagcgacctcaatcaggccattcttaagacttaacactttgttgttatgggagatatcggcgctcactttgccaatattctgccccataacccagcattcttgacagcgaagctgcaacgctggccaatcgcggaacgaaacatcatgacttagtggagaatcttgcaacgccgcttttgacaaaggtttatcaacatcttgcgccgtccactgcgggttgtagtagagatagcgaatatctgcccgccacggcccgctgctggctacgcgcacgctgccatccacttcgcgccctttggcgctaatatttgtcccattcagctgcggctcaatccgcagggtcagattatgccaagcctggccgcccagcagcagttctggcgtttgtagctcaatgcgagaaggtaatgtgaactggctctggctggcagattttttaccgatcatggatgacgcctgcggagaggctgatgctagcgcagggccaattagcgccagccaacgttccccatccaaagggggcaaattcaccaccaaccctttttcagcaggtaatggcgggacttttttgctgtcggtttgccagaccgctttactcaattcgactttctgatcttttaacaaccattgactgttaaaatgattcgttcctgccgctgaaccagaaagcgtgaatccattgaggccacctttggcctgaacgctcaccggcaaagattcaccgccttgagtatctagcggcggcggtaagcgactgctcactttctttaggtctgcgttgacatctaccagataacttggctccccgtgcttcggcaactgcaccgcaactttgccctgccaaccgaagctacccttcagctgtttggctatttcagcgggaatctcggtgattttggctggaatccagtcaccgcgcaggttaaccccaacctgaaagttgtctttttgctcttccgtggtgaaatttaccgtcagcggctgaccaaaccagttagccgatatttcatcgctcgacagattgccatcgctaaagcggaatttaccgctgacattttccaactgactttgcagtggcttaatcaataaactgttgttgtgcagcgtcacttcaccggtagcgtgcgtgatattgccttctaccaagggaatatccagatgtaagcgcccacttacacccccaccaacctggagttcatccaatgcactccccacggaatcatgtagcggcgtatcgttaaagtaatcatgaacatccgagcctagccccgctacctgcgcatcaacaaacaggcgttctttcagataatcaggaatattggcgctgatattggtgccggtgacgttccccagcattgcccgcggtgcattcatccacaggccgtcattgaggaaattcaggtcgatagccagattttccagcgctggccattccggttggaactggaaggtcgcattacgcaacggaacataaacctggaattgaccctcgttatgggtataagggaaataatgtggattaccgttatagaccaacgtggcgttatccacctgcccgccctgaatcgcgccggtcagataatccaccaacgctttccccatcaaaggctgagggaagtaacgccaggcatctgcgccgtcatacaggcggataccggccagaatattcagccacggctggcctttttccggctgttgataacggaaactaccgtttgcccacaaagacttggcttttacatccagcttatcgctccacagctcccagcctttatcatccatgcgccagtcaatgtcgccctgagcgctgctgacttccagcggtgcgccaaacatgtcaccgtaaggcaaaatgctgtcgtgcagatttaccgccagacgcccatggctgacggaaccgctcaatgtgccagagaaatgattcacgcccggtaagagttcccaatgctgccagctgacatcttgccatttagcctgaaaacgggtcaattctggctgttttagaggaatatccagcgccagcgcattcaaatgcccctgcggttttaaatctccccaacgggccagtaaatccggggtaaacaaagaaatggtcggtaacagcggcccaattcgctctaactgaaggtctttggcacgaaggcgtaattcttccggctgatccgggcccagcagtttattattttccggcaaccacagcgccgacaggctcccttgcggccacgcctggccgtcagtggttaaattcagctgtggggcatcaatctgccagccatttccctgacgacgcgcgtccactaccagttgatcgacagcgagctgatggggttcaccttgagtagtccaagcggcttgcccttgttttagcagcacattcccactgtaaatatcgccgcctttgagcgtcagccaagctgccagactaaattcggcgctgtctaatccggtattattatgcaaccagcggctgatccaaggcttcacgtcaatattatcagcctgcatatatacagtgccgttattcagaatgccctgatcgtcgtgtaaatccatccgtacctgaaccacgccgtgctggccattaatcgtcgataggctgatctgcccttcggcgcgatggcggttacgcgagttaagccaggttaactgaggaatttccagctcggcgctggaaccagaaggggtaagaaatgaaatgcggctgttacgcagatcgaaatgatccaactgacgcagaaaaatatcggtgaagtggctggattcaaaagaacggttctgatcacccggattaatcagcggacgatccaaatccagctgtagctgatggaacgtcatatcccgtagctgccagcgccagtgcagcaaagattgccagacatccagcgctagcgtgatgcgctgaacctgcaatttggtatcaggcaactgggcgcgcagatcccgtacttccagcgtcgggccaaaagtttcccaactgccttgaataaaaccaatttccagcggaattccgctgacggcctgaatcttagcctgtagctgcgcacgatagtcgttgagctgcggcaacatcaaacgaagcccactcaccaacaatgccaccacaacaatcattgtggcgcctgtcgctaacaaaatcctgggcagtcgcctcacgcatctctccttgcttcccgctgcaaggggcgcagcggaaatttattacatcatcaccacgtcaaactgctcttggctgtagagcggttcaatttgaacttttacctgcttaccgacgaaaatttccacttcggccagcgcatgggattcttcgctcttcagcgcttcccctaccgcaggtgaggcatagaccaggaatctgtcggtatcataggcatggtgaacccgcacgatttctcgcaggatttcatagcataccgtttcgacggatttgaccgtgccgcgaccgtgacaagtaggacaatcattacacagcacgtgctcaatactttcgcgggtgcgcttgcgggtcatctccactaatcctagctgagagaaaccgttaatactggttttcactcgatctttgctcagcgcctgctctaatgagtgtaatacacggcgacggtgctcttcattactcatatcaataaaatcaatgatgattatcccaccgaggttacgcattcgcagctggcgagcaatggcctgagtggcttcgatattagtattgaaaatggtttcatcgaggttacggtggccgacaaatgccccagtgttgatatcgatggtggtcatagcttcagtttggtcgataatcaggtaaccaccagatttcaattcaactttacgctccagagaacgttgaatctcgttttctacatcatacagatcgaaaataggttgtttgccggaatagtgctccagcttattggtcatttctggaatatattcgcgggtaaattcgatcagttgctcataggtctggcgggaatcgacccgaatgcgatccaaggccgcgcccgcaaaatcccgtagaattcgctgcgccagagccatttcgccgtacagtttgcatttagttttatcacgttttttacgcagctgtactttggcccacagacgttttaaaaacgccgcgtccgcggataactcttcttcaccaataccttcggcggcggtacggataataaatccgccctgctcatcgcaatagctggccactgtatttttcagacgatcgcgctcagcttcgctttcaatacgctgagacacaccaacgtgcgccgctccgggcatcaacaccagataacgagaaggcagcgtgatatccgtagtcaggcgcgcgcctttggtgcccagcggatctttgaccacctgcaccatgagatcctgcccctgacgtaccagttcagcgatatcacgtacattgaaattcttttgctcatccccagccacgcattcggtgtggggcataatgtctgaagcatgaaggaaagccgccttatccaggcctatatcgacaaaagccgcctgcattccaggcaaaacccggctaacgcgacctttgtaaatgttaccgacgatgcctcttttcgcttcacgctcaatgtgaatttcctgcaggatgccaccgtcgatgtaggcaacccgcgtttcagacggtgtaatattgaccagtaattcagctgtcatgtattcctctcacatcacgtagcgcgaaaaaatgactcagtagttcatgggtttctaccaacggcaggccgacaacggcgtgataactgcctttaatcgccctgacgaaacaaccacccttgccctgaataccgtaagcgcccgctttgtccatcggttcaccggtagcaatatagtcactgatttcttgttgagataacacgcggaatgtcacatctgtcacgaccattgtgccgagtaaatcctgtttatcggctaatgcaacggcggtcatcacctgatgctgctgcccggacaacgcacccaacatttgcgcggcatgaacagcatctcgcggtttttccaaaacctgtccattaagcaccacaatggtatcggcaccgagtaccggtaaatcccactcggcaaccgccactccggcgcgcgctttatcttcagccaaacgtcggacatagtcctcggcggcttcccccggattacgctgttcctccacttccgttttcagtatttcaaacggtaaatcgagaagcgcgagcagttcacgccgacggggagaacctgaggccagataaagggctgtcattggaaaaatccttattgcaccgcaaacttacggcgaatcttacgcattaataagaatagccacggccataagataccgttaattaaactactccagaaaacttcaggtcggaacgaaacgttaatcactaagaattctgaccagaacaccacaacatccatcgttagcgacagaagcatcacgattaatgcctgctgccacagcgccatattgcggaataactgaaacttaaaggccaccagataggcaatgatgctcaatgccaacgcacgcacgccaagagttgaacctaaaatcagatccaaaatcaggccgagaataaagccgctgccaacgttaacccgatgaggcaatgccataacccagtaaatcaggatcaacgtcagccatgacgggcggaacatataaatttcttttggccacggcatcacctgtagcaccattgcaatcaggaatgatagccagataacccagcgcccattactggtgtaacggttcatggcgtcgcccttaccgctggcgcgttcgccggaggcggattcaaactggctggtgccggtgggccgaccatttcgctggcgcttggcaatacctgaggcatcatctgcatcagacgctcattagccacccgatgtacttcattcggcggcaacggcaaatcgccattgcgatccgcgccccacagcaacagcaaataacgcagacgctgtaaatcggccattggacgagcctgaataacggtataggcgcgctgattatcgactttaaccgaagaaaccaccgccaccggataaccttctgggaaacgtccaccgaggccagatgtcaccaaaacatcaccaacacgaatatcagtattgcttggcaaatgttcgagcaataagtcgtcgctacagccgccaccggcagcaataacgcgaatgtcattacgcaagacttgaatcggtagcgcgtgggacgcatcgcatatcaacagcacgcggctggtgaatttgctgaccgccactacctgcccgaccacgcctttatcactgatcaccggctggccttcatacacgccattatcggtgcccttatcgatcaccacctgatcgctataaggatcggtgccgctggaaataacctgcgtcaccattttttgttcgtcctgacgcagcggagagccgagtaactcgcgcagacgtgagttttcctgcttaaactggccaagcaactgtagatcggtatttttaagcaacagttcctgacgtaacgcacgattttccagctcaagctgttggcgcgttgcgatggtttctgaaacgctgtctaaaactttacgtggcccattggccagaaaatagaaggggctaactgcggtgtccatataggtacgaattttaacgaacgtaccgagccggctatcgacaataaccagcgcaatggctgcaagaacggcgaagaaaagtcgcagttgcagggatggaccccggctaaaaatcggcttcataaattatgcgtattcctcgacaacaaaaaggaggcactaaacctgatgatgcaataccttcatccgatccagccctccttttttggctgactattcttcgctgaacaaatcgccgccatgcatgtcgatcatttccaacgctttgccaccgccgcgagctacgcaggtcagagggtcttctgcaaccacaaccggaatgcctgtttcttccattaacaaacgatccagattacgcagcaatgcgccgccgccggttaacaccatgccgcgttcggagatatcggaggccaattctggtggacactgttccagagcaaccataaccgcgctaacgatgccggtcagtggctcttgcagagcttccagaatctcgttggaattcagagtaaagccgcgcggaacaccttctgccaggttacggccacggacttcgatttccagcacttcatcacccggatacgccgagccgatgctgtgcttgatacgttcagccgttgcttcaccgatcagagagccatagttacgacgcacataattaatgatcgcttcatcaaagcggtcaccaccgatgcgtacagaagaggagtaaaccacaccgttcagtgagatcaccgccacttccgtagtaccgccaccgatatccacaaccattgaaccggttgcctcggaaaccggcaggccagcaccgattgcagccgccattggctcttcaatcaggaacacttcgcgagcaccggcaccctgggctgattcacgaattgcacgacgttctacctgggtagcaccgactggcacacacaccaatacgcgcggacttgggcgcataaagctgttgctatgaacctgtttgataaaatgctgaagcattttttcggtcacgaagaaatcggcgataacgccgtctttcatcgggcgaatcgcggcgatattgccaggagtacgccccagcatctgcttggcatcatgacccacagctgcaacgcttttgggggaaccggcacgatcctggcgaatagcaaccaccgagggttcattcagtacgatgccttgtccttttacataaatcagggtattggcggtacccaagtcgatggacaagtcgttggaaaacatgccacgaaatttcttaaacataacgaaaggataatcctgcaagctgggggcgaaaaataaaatccgcctactttaccaaccacacggagcagcgacaaggcgcaaaaacgtcctactccggtgaaaaagtggctacgttattccaatcaagttccgctgaataaggtatatgcactaaaacccttgaataaaggctcattataccccccagtcgacgcgtcgaacggtgtaacacagcacataaaatctaacatttaacctgatttaccgccggaagtaagtgcctaccaacggtctacggaaatggctgggacattctacgttaatttttgctcaacgatcaggctaaacatggccctgttacgaatattttttctgctctgggttcaaaagcatcggcgcagcaaaaaaattgccctgtccgccataaacccctttctgtagcagcgtttcccattcttccctggtcaccacttctgcggcaaaaactttaacattcgtaccggcacaggcaccagtaagactttgcacaaatagctgattttcaaggcggacatcaatacttcttaccaatcccggatgtaacttaatcatttccacccgtaaagacttaatatatgaggtactgaccaccgtcaatccggcctgcgaaaccatcaatctacaacctaaccctaacaacaatcgaatcacagggcgtagggcctcaatatgttggcagacatccgcctcagccagctcaaagataatccgctgacggtaacttttccggcactgtaataaggtatcccgtagccaacgcttaaaggaacgttgcaataatgaatcaacgcttatggaaaatgccagcgtttcatccggccacagcgccaacaaaggaattatccgacctattttctgtcgatcataacgttcggccaacccgagcaaacgtaccaacggagtaaactccgccgctatcagctcttgttcgccatcaaatatccggctgatgatttcacggtgatgaatttttccatcacaggtaatgaccggtttctgatacaacctagggccaccgttaaccagcgttttttccagcaatgttcgccacttaacgctaccgcgtcctttctccggcacctgattgtcatagacataccagctattgcctccatacaacgccgcatttttggtagcttgtccagcattatccataatttgttccgccgcctgcccgtggcgataggccacgataccaatattgagcaaagcgtcgcgatcgataatctgcggcgctggcatggcacccgccacatgaaccaactgtgccgccatcacatcggcgtctttcagagttttatgcggtaataaaatggcaaaatcgctgttggcgtagtgagctagcagtgcggaaggataacggtcgacaaaagtggaaagcagattcaccatcgaatgcatcaattcctgcacccgtgatttgtcgtaaacctcacttaacgcatcaaaatcgggtaagtgcaccatcatcactacgccgtgggcaccgggttcttcaagctgggtagtcagctgattatcaaaaaacagcgcgttattcaggccggttttagcgtcctgtgcggcataggagcgaatcaaagtatccaattggctgcgttcttcacgcatttccgccaaatccagcagcaaacggtcgagagcatggctggcataaggcggccactcatgagtttcaccgcgcagtacattctcacgctcgccgttgagaatacgtcgcgctcggttctccagttgctcctcacctgccgtttgttcccgcagccagcgaaaacttaaaaacagaatgaccgcaatcatcgccaccgccaacgacaaaatcaccgctgcatacattgaacgagtgtaactggtgagcggatcgatataagtcaggcgcatcgaactgccgggctgctgtaataatggaagagacagttcgcgatagccgctattggtatcccaggcggtataagtaggaaggactttcagataaaacaattgatgctgcgaattttcaacgctgatttcaaccacgccaatagcgcccatcatcaacggcaaccagctacgcggaacttcaggtggatcggttagtaaggattgatcgtacgcggtcacgatagtattaaggcgatgttccatttttttctggcataagtagaaaaaactgaacgtactccctaacaacattaaacacatggccaatacgaccagtaatgccataaacgcagaaagtttggttgtaaatcgcatccctcagccttgcctaccgcagttaaatggaaagtattcctcactcctttagggcaggtactatatgataaaaccgaccacggacgctggttttttaatgttttatacgacaaaaacgcaattttttacgaaattcgcatccattgcctcatccttaccctgcataaagcatagtcactgatataagcatcgaggccaaatttgtcctcggtcagccttcgaacttgatgtttccggtatagtcacccaacctgatgaatacgaaattttcgatcgttattagtcgatcgttcgttattagtcgatcattgttaacggcacttcttagggagcctctaatgcgcgcactgttactcgaacagcacgatggcaaaaccttggccaacgtccgtgatatttcaccggaacaactgcctgcgggtgaagtcacggttgatgtcagttggtctagcctgaactacaaagatgcactggcgatcaccggtaaaggcaaaatcattcgtcagttccctatggtgccaggcattgatttcgccggaaccgttcacagcagcgaagatccgcgttttcacattggccagcgggtattgctgaccggctggggcgtaggcgaaaaccattggggcgggctggcagaacaggcgcgagtacagggtgaatggctggttccgctccccgcaggtttggatgcgcgcaaagcgatgattatcggtaccgccggtttcactgcgatgctgtgcgtgatggcgctggaagaaggcggagtcacaccagaaagcggcgaaattgtggtgaccggtgccagcggcggcgtgggcagtactgcgattgctctgctttcagctctgggctatcaggtagccgctatcagtggccgtgaagcgaataacgactatttactgtcactcggagccaaacgggttctgccgcgtagcgatttcagcgatgcatctcgtccgttggaaaaacagctatgggctggcgctattgataccgtcggcgacactttactagccaaggtgctggcacagatgaactataactctaccgtcgccgcctgcggtctggccgggggttataaactgccaaccacggtaatgccttttatcctgcgcaacgtgcgtttacaaggtgtagattctgtcatgacaccgcaaccgcgccgtcgggctgcctgggagcgtctgttgaaaacgttgccagaaagcttctatcaacaggctggacgtgaaattacgctagaacaggctcctgcggtagcagccgaactgatggaaaatcaggttactggccgaaccttggttaaagttcgctaattagcccattaaaatagagtcatttcattgggcggatgtttcgttcgcccaatctcagaaatttcatattttctgctaacctctcgcttttacagccttttcacaccatgctttattccattacggtcagtatgactttctctgcccgatggagtaatcacatgagcaaacaacgcaaattaaccgaatctgacgtcacgccggaaagcgtgttttatcaacgccgtaaggtgctgcaagcgctgggtattaccgccgccagtctggcattgccggtttcggctcaggctgacctactgtcttggtttaaaggtaaagatcagcccaaggcaccggcaggcaagccgctcaccttcagtaagccaccagcctatcatcctgactgggaactgacgccggaagacaaagtgactggctacaacaacttctacgaattcggtctggataaagctgacccggccgctaacgccggtggattaaaaaccggcgattggcagattcgtatcgatggtgacgtcgccaaaccaatgacgttgagcatcgacgatttgctcaaacgcttcccgctggaagaacgcatttatcgtatgcgctgcgtggaagcctggtcgatggtggtgccttggatcggtttcgagctaggaaaactgctaaagctagtcgaacccaccagcaacgcgcgctatgtggcattccaaaccttgtacgatccggatcagatgccgggacagaaagatcgctttgtgggcggcgggttgaaatatccctatgtagaaggtttgcgattagatgaagcgatgcatccgctggcctttatgacactgggcgtgtacggcaaaacgttaccaccacagaacggcgcgccgctgcgtctgatcacgccgtggaaatacggttttaaaggcattaaatctatcgttcatattcgactcactcgcgaacagccgccaacgacctggaatctcagcgcgccgaacgagtacggtttctacgctaacgtgaatcccaatgtggatcatccgcgctggtcgcaggctaccgaacgctttatcggttccggcgggattttagacgttaagcgccagccaaccctgctatttaacggctatgccgatcaggtggcttcgctatatcgcggcatggatttgcgggagaatttttaatgcgtctgagcctgaaacaggtcaaagggttgaaagtagcaatctggctggccgcctcattgcccttcttctggctaattttatccgtcgatcagggctggttcagcgccgatccgtccaaagacattcagcattttaccgggcgcatgactctcaagctgctgctggccaccctgttggtgacaccgctggctcgctatggcaagcagccgttgctgatgcgctgtcgccgcctgttgggagtatggtgttttgcctggggaaccctgcatttagccagttattcagtgctagagctggggctgtccaatatcggtttgctggggaaagaattagttacccgcccctatttaactttaggtattattagctggctattactgttcgcactagcagttacatcgacacagtgggcacagagaaaaatgggacctaactggcaaaaattgcataatttcgtttatctcatcgccatcctggcaccgattcactatctttggtcggtcaaaactttatcacccttgccgataatttacgcaatcgcagcaattattttgttagcactgcgttataaaaaatttcgccaatggtgccgctaaatgctgggacttcaccctcttctaccccagataatccgttaggctttgtatagttcaccatgtttcttattgaatatcttcgctgataagaccagtatttagctgctaattgctacgatatcattataatgctccaccttagttccgatcgtagtgggaatttcaccgttaacaggtgacaaatcggtggcatcaggctatttttgacgatgacgaactaattgccggagataccagcataatggcggacaagtttcacattttgcttctgaacggcccgaatttaaatctgcttggctctcgcgagccagaaaagtatggttacaccacgctggcagagattgttaacgggttggagacacaggctcagaatttgggtgttgcgttatcccatctgcaatccaatgcagaacatgcgctgatagacagaattcatcaggcacggggcaacactgatttcatcctgattaacccggcggcgtttacgcataccagtgtcgctttacgcgatgctctgttaggcgttcagatcccgtttatcgagatccatctgtctaacgtgcatgctcgggagcctttccgtcaccattcatatctctccgatattgcggttggcgtgatctgcggactcggcgcagacggctacaactttgctttacaggcagcggtcaatcgcttgtcaaaatccaattaattgcaacgcaaaagagtacggaatcacactcatggatattcgtaaaatcaagaaactgatcgaactggtagaagaatctggcatttccgagctggagatttcagaaggtgaagaatcagtacgtatcagtcgtgctacagccgcaccaagctacccaatgatgcaacagccttatgcttttgccgcgccacagcagccagcattggctaacgctgtagcaccggcaccggctgctgaagccgctgcacccgcagccatcagtggtcacatcgtgcgctccccaatggtcggtactttctaccgcaccccgagcccagatgctaaagccttcatcgaagtaggtcagaaagtttctgctggtgataccctttgcatcgttgaagcgatgaaaatgatgaaccaaatcgaggcagacaaatccggtactatcaaggccattctggtcgagaacggtcaaccggttgaattcgacgagcctcttgtcgtcatcgaataacgaggcgttccatgcttgataaaatcgttatcgctaaccgcggtgagatcgcgctacgtattctgcgagcttgtaaagagctgggcatcaaaaccgtagccgttcactcctctgcggatcgcgatctgaaacacgttctgttggctgacgaaaccgtgtgtatcggtccggcagcgtcagtcaaaagctatctgaacattcctgcaatcatttcagcagcagaaatcaccggcgcggtggctattcaccctggttatggtttcctgtccgaaaacgcagactttgccgagcaggtagagcgttcaggtttcatctttatcggtcctcgcgccgaaaccattcgtctgatgggcgacaaggtttccgcaatcagcgccatgaagaaagccggtgtaccttgtgtgccgggttctgacggcccgctgagcgacgacaccacgcaaaacaaagctttcgccaaacgcatcggttatccggtgatcatcaaggcgtccggcggcggcggcggtcgtggtatgcgcgtagtgcgcaacgacaaagatctggaagaatccattaacatgactcgtgcggaagccaaagcggctttcaacaacgacatggtttacatggaaaaataccttgagaatccgcgccatatcgaaattcagattttggcagacggtcaaggtaacgcgatttatctggctgaacgcgactgctctatgcagcgtcgtcaccagaaagtggttgaagaagcgccagcaccgggcatcaccagcgaaatgcgtcgttatatcggcgaacgctgtgcaaaagcctgtgtggaaatcggctaccgcggcgcaggtacttttgagttcctgtatgaaaacggcgagttctatttcatcgaaatgaacacccgtattcaggttgagcatccggttaccgaaatgattaccggcgtcgatttgatcaaagaacagctacgcatcgcggcaggccagcctctctccattaaacaggatgaagtgaaggttcacggccatgcggtcgagtgtcgtatcaacgctgaagatccaaataccttcctgccaagtccgggtaaaattacccgtttccatgcgccgggtggctttggtgttcgttgggaatctcatatctacgctggctataccgtgcctccgtactacgattccatgatcggcaaactgatcacttacggtgaaaaccgtgacgtggcaatttcccgcatgaaaaatgctctggcagagctgatcatcgatggcatcaaaaccaacgttgaactgcaacagcgcattatgaatgacgaaaacttccagcacggtggcaccaatatccactatctggagaaaaaacttgggttgcaagaaacctgattttatttcgcctgaaaatcaaggccggttaataccggccttttttattttctgatcaaacagggctaggcaaacgccgcgcttgccgtaaaatcccctacccttgttaaactcagaaccgtcaatacccacgggagaatgaatggacacgagatttgttcaagcccacaaagaagcgcgctgggcctttggtctgactctggcctatctggcaggctggttattgtgcgcctattttcctggcgatgtgccggggatgaccgggttacccgcctggtttgaaatggcctgtctggccctgccactgctatttattgtgctgtgctggctgatggttcgctttatattccgcgatattccgctggaggacagtgatgcaaactgatgtcgtcctgccattagttgcctatctggcattggtttttggcctttctatttacgcatacacccggcgacagaccggtaatttcctcaacgaatacttcatcggcaaccgttcgatgggagggttcgtattggcgatgactctgaccgccacctatattagcgccagttcatttatcggcgggccgggagctgcttataaatacggcctcggctgggtattactggcgatgattcagttgccagcggtgtggctgtcgctaggcgtactgggtaagaagtttgcgattctggcgcgtcgttataacgccgtaactctgaatgacatgctgtacgcacgctatcaaagtcgtttactggtgtggctggccagcctgagcctgttagtcgcctttgtcggtgccatgacggtgcagtttatcggcggagcgcgtttactggaaaccgctgcgggtattccctacgatactgggctgctgatctttggcgttagtatcgcgctctatacctccttcggaggtttccgcgccagcgtattgaatgatgcgctgcaagggctggtgatgctggtaggaaccattttactgctggttgcggtggttcacgccgccggcggcctgcataaggcggtcgatacgctacaacacatcgatccggcgctggtttccccgcaaggtggcgacggtatcctcgatttgccgtttatggcgtcattctggattctggtgtgcttcggcgtcattggcctgccacatacagcagtacgttgcatttcctatcgagatagcaaagcggttcaccgtggcattattctgggcactattgtggtggcgattttgatgtttggtatgcatttggctggcgcattgggccgggcgatcctgccagatctgaaaattccggatcaggttattcctacgctaatgatcactgtgctaccgccgttcgccgcagggatcttcctcgccgcgcctatggcggccattatgtcgaccatcaatgctcagctattgcagtcttccgcgactatcgtcaaagatttgtacctgaatttccgtccggaacagatcaaaaacgagcgtaagctggctcgtatttccagcatggccacgctggttctcggcctgctgctattgctggcagcctggcgtccgccggaaatgattatctggctgaatttactagcctttggcggtctggaagcggtattcctctggccgctggttctggggctgtattgggaacgcgctaacgctcacggtgctcttagctcaatgatcgtcggtgcggtatgctatacgctacttgccagtttcgacattaagatcgccggattgcacccgatcgtgccgtcacttgtgctgaacttgctggcgttttatatcggtaaccggtttggcgacagagcgcgggcgcgacagcctgtcgtcgccaacgctgaataaatcgctatttaacggtattatttaccgaaaccttattgacaaaaaccggtccaaaaacgcaagttgcggagcggttttagaagagaaaagctatgccttggatccaattaaagttaaacacttccggtaatcaggccgaatccctcggggacgcgctggttgagagtggcgcagtatccgtcaccttccaggatacccacgataatccggtatttgagccgctgccgggggaaacccgtctgtggggcgatactgatgtgattggcctgtacgatgccgaaaccgatatggctgaagtgatcgctgtgctggaatacaacccgcagttaggcaaaggcttcgcccacaaaattgaacaactggaagacaaagattgggaacgtgagtggatggataatttccacccaatgcgctttggcgagcgcctgtggatttgcccaagctggcgcgatgtgccagatccaaccgccgttaacgtgatgctcgatcccggtttggccttcggtaccggtactcatcccaccacctctctttgtctacaatggctagacgggctggatttggaaggtaaaactatcatcgatttcggctgtggctccggcattctggccattgcggctctgaagctgggtgccagccgcgctatcggcattgatatcgatccgcaggccattcaggccagccgcgataatgcgcagcgtaatggcgtttcagagcgtctggaactgtatctgccgaaagaccagccgacggatctgtctgccgacgtcgttgtcgccaatattctggctggcccactgcgcgaactggctccgttgattagcgtgctgccgaaagtcggcggtcatttgggtctgtctggcgtactggcgactcaggctgccagcgttgctcaggcttatgaagataaattcgcgctggacccagtggcagagaaagaagaatggtgccgcattaccggcgtcagaaaataatccccacgctatttatccccgcttacggcctcactacgccgctggcggggttatttcccccgtcgtcatacccaagcccgccttttacacttaatcgctgtgtgagctttctgctgcgttaacatgtctttgttgcagctgatagcgacgcgtcatgttttttcctcaaagtgagagctttctcacaggatttatggggttattactgtggtttaacgcagttttgcttactaaatcagcagtatcgatcggtgttaaaagaagtttccagtcaataatcagggtgtttagcagaaaatattgtcgtacataaaacaaccaataatttataactgcatgtttaatatgaataaataattattattacaagattagctggctatttattgctatttttaagccaattggtcaaagtttggcctttcatctgaacgtaaaaatgcgtaatatacgcgcccttgcggacacagtatggtcattctttgtctatgcacattggacacttccagcttaaaaattgcctgattgccgccccgatggccggtataacagaccgacccttcagagccttatgtcatgcgatgggggctgggatggctgtatctgaaatgctctcctccaatccggaggtgtggcggacggataagtcgcgtctacgcatggtccatagcgatgagcccggtattcgtaccgtgcagatagccggttgcgatccggatgatatggcagcggccgccagaattaatgtggcgggcggcgctcagatcattgacatcaatatggggtgcccggccaagaaagtgaaccgtaagctggcaggatctgcattgttgcagtatcccgatctggttaaacagatcctctccgcagtcgttaatgcggtagatgtgcctgtcacgctgaaaattcggactggttgggctccggaacaccgtaactgtatagagattgcccaattggccgaaagttgtggtatacaagccctgacaattcatggccgaacccgtgcttgcctgtttaatggtgaagcggagtacgacagcattcgggcagttaagcagagtgtttccattccgattatcgcgaatggcgacataactgacccgcataaagccagagcggtacttgattacactggggctgacgccctgatgataggccgtgccgctcaggggagaccctggatcttccgggaaatccagcattatctggacactggggaactgctgccaccgatgccacttggcgaagtgcagcgtttgttaaacgggcatatacgggaattgcacgacttttatggtccaggcaagggattccgtattgcacgtaagcacgtatcctggtatctccaggagcacgccccaaacgaccagtttcggcgcacattcaacgccattgaggatgccagcgaacagctggaggcgttggaggcatatttcgaaaatcttgcgtaaacagaaaaaagagctgacagaactatgttcgaacaacgcgtaaattctgacgtactgaccgttgcaaccgtaaactcacaagatcaggtgactcaaaagcctctgcgtgactcggttaaacaagcactgaagaactattttgctcaactgaatggtcaagatgtaagtgacctgtatgagttggtactggctgaagttgaacagccattgttggacatggtgatgcaatacacccgtggcaaccaaacccgtgctgccctgatgatgggcatcaaccgcggtacgctgcgtaaaaaattaaaaaaatacggcatgaactgatactagtcagttaggttgttgtttaaaaaggcgtactccacacggagaacgccttttttattgcctgtaaactgcccgctgttctgagataaggagaacaacctcgcaaaaaacaaatgattccttcactaattaaatggtcaatcatacttatacaatcacaacccttcgtagtaaggtattttttagaaaaagttatcgcaatgttctgattttattatttaaattggtaaatatcatgtattctttgtcgtccccgcccatcgggcaacctgatagtgctgtatcaatcttatcgattcactcaatcacttttcagtcattcaataagtttctggttattaacgagctatattaattacagcccaaattctgcctatagcgcggactatcgaatataaggtagatactataaataataacgccggtggttggactattaatgaatcgctgaaggcctgtgaattacctgcaaatatcaaaacaggttttgctggcgtgactaaaaacctggttggagcggaatgcgttccggtattatatgctgccaagcagagaggcaacggtaccaaccctacgctgatttgtgtgcaacccctttcagaaaaaggcacgagcaaacatcttgtgacatttatccttcaggaatccttggataaaaagtcagcagcgccctatcacgcctatcgttaaataattcagtttattgatggagttaaataatggagttaaataatgcaggtaaataacagagataaataatagagataaataatagagataaatagtcatttttatattttcaatttgattaccgcaactaaatacacccgcccctcgacaattatttttgtcggaatggctgcttattttatttattaatgaaaaatcactgcaacgacagtctcttagcaaatcagacaacgtcatcctaaatatcctgcaatgggtagaacagaacgttatttccccttgagtttgattaattaatctctttatttcactcaggagatatatgttatacttgcccaaagagccgcttctcgcctgccaactgcctccgattgagacccgaaacaccgcgcgatccccgcttttaatgtaaagattctgtcaattattggtttgatgaaaacgataagcgacaactggtgtcttaaataatgtaccgctaacgagttatttccttatgcgttacacattcgctcctaacgcataatgattgagttaacatgataaaaccccaaaagttccagctttcgctgcttcatcctcgctattggctaacctggtttggtctcggcgtcctatttttactggttcagttaccttacccactgctgcaaaagctcggcgtgtggctgggccggacttcaatgcgttttctgaaacgccgcgtctccattgcccgccgcaatctggaactgtgtttcccggatatggataagcaagtgctggaacgcaccattgtcggcaactttgaatccctgggcatggggctgatggaaaccggaatggcctggttctggcctgattcgcgggttaaacgctggttcaccgtttcaggcctgaatcacctgaagaaagcgcaggaaggcaaccgaggcgtgctggttatcggcgtacactttatgtcgctggaactcggcggccgcgtgatgggccaatgccagccgatgatggcgatgtatcgtccgcacaacaacaaagcaatggaatttgtacagacctggggtcgtatgcgttcgaataaagcgatgttggatcgtaaagatctgcgcggcatggtacatgcattgaaaaaaggcgaagccgtctggtttgcacctgatcaggactacggcccgcgcggtagcgtatttgccccgttctttgccgtcaatcaggccgcgactaccagcggtactttcatgctggctcgtctggccaaaccggcgctgttacctttggtgctactacgcaaacccgatggcagtggttatgacctgctgattcagccagcgctagaagattatccgattgacgatgagcaagccgccgcctgttatatgaataaggtgctggaaaaagagatcttgcgtgcgccagagcaatatctatggctgcatcgccgctttaaaacccgcccagcgggtgcgccttcgctgtattagcaccatctgaatagcaaaaaaccggcggagccggttttttattgtctgaagaacgccaaatcgcggctacttcgccgttttatcttctacgcgatagtccgaaagcgatgagaacgtgcgggttgcttcatccagcacatcaatagaaccggtttcaatatcataaacccaaccgtgtaagcgcaaacgcccctgcgctgtcgccaatgccaccgacgggtgagttttaatattcgccagctgcgcaatcacgttctcacgtaccagagaattcagccgatctttgggtgaaacatgcggcaacgcggcattgaccagcttggccgaatccgcatgacgcaaccaggctgcgaccgcaggcagatgatccaaacactgacactcggcaatcgcgctcatggcaccacagtttgaatgcccgcaaattaccacatcggtaacgcccagcactgccacagcatattctaccgtcgcggaaacaccgcccggctcaggcccgtaagaaggcacaatatttccggcattacgaatgacaaacagctctcccggctcccgttgagtcagcagttccggcaccacgcggctatcagagcaagtcacaaacagcgcgccgggactctgtgtatcggccagctgtttaaatagctcagaacgctgtggaaacacttctcgttggaacttcagaaaaccgtcaataatatcttgcatcatatctctcctcgcccgttcaacgctggcccacgccagcacgctggcaagttttgtcgcttaccataataaatatcctatcagcggcgcgcctattacggtaataattccagccaacatcatgactaggctagcgactaccccttcctgttgccccatttcataagctttggccgttcctgcaccgtgggaagaggcgcccaaaccggcaccttttgctaaaccgctacgcaccgatagccgcagaaacagcaaatcgcctaccgccataccgaatacgccggtaatcaccacaaacagtgcgaccaaatcgggctgtccacccaactgtttcgccgcttccagcgcaaagggcgtggtgatagagcgcaccgccagactgcgctgcacctcttccgagagcgtcagcagcttcgctagccataccgaactggctaccgcaacggtaatcgcagttatcactcctgcgctgagagaaagccagtggcgacgaataatcgacagattctcatacaccggtaccgcaaaggcgatagtggctggaccaagtagccataacaaccaatgggtttctccaatataatcctgataggaaatatgagtaaccaccagcaataacaccaaaatcatgggtgtcagcacgagtggcatgagcagcaaggaacagcgacgaagatagagtttcttattggcaaaataaagccccagcgtcgccaaaaagcacaggatactgataataaagtcattcatgatgagctgatttacgccgctgtagccagatttcaaaccgatagactcgatcgaccactaacccggtagcggccagtgtcagcatggtactcacggcgataacggcaaaaatcttccaaccctcaaccattaatagctgggaataattcaccacggctaccaccgccggaacaaagaacagcagcatttctgccaataaccagcgagaaccggctttaacccagcccatcggcataatgcgtaatacgatcagcgtcagtagcaacaacatacctacgatattggctggcagtggcaaatggaaaacccgaactaattgatcggcaatcacaaagagcccaacgtataacgccacttgaaccggcacctgtatgcgttggaggaaagacggcgcaaaactgcgtaacgccaatgacatgagtgaaccccaatgggaaagattttacagcatccagtataggcgcgcggaaagcttgccaaaaatgaattaaaattatcttaatcatgccaaattggcatacttagggtgatgctcaagctaccagccaatttttggggaatacagatggatatccgtaccttacgctactttgtcgaggtcgtacgccagcagagcttcactcgcgccgcagagaagctgtttgtcactcaaccaactatcagcaaaatgctgcgcaatctggaagaagagctggaatgcagtctgttgattcgcgaaggtcgccgcctgcatttaaccgatagcggtcaggccgtttatcagcgcggtgtcgccattttggatcagtttcagcagttagaagccgagctggaagatattggttcgctgaaaaaaggccgcctgcgcctgggcataccgccgatggtcggcacccaaatggcggtattaatcagcgaatttcgccaaagttaccccggtgtagaactccgtattgccgaattcggcggcctgaccgtccagcaggcagtgctttccggcgagctggatttagcgcttaccgccctgcccgccaatgccgatttgcctctgacttcattaccattattcagccatccactgtgcgtggtggtgccgcgcacgcccttttggctgaaccgaaccaccattagtattcccgaattggcagaacagtcgatcctgatttataacgaggatttcgcgctttatcgccagttgatggacgcattctccgctaacggattttcaccgaaaattgccgttcgcagcggtcaatgggattttctggctgcgatggtgcaggccaatatcggcattgccattttgccggagcctatctgtcagcggttggataagagtacgttactgtggcttccgctggaacctttactcccttggcaactggggctgatttggcgccagggcagctatttgtcccacagcgcgcaggcgtggattgcccgttgtcgagaattctggcccaacggctcgttattaggaaaaaaacgggagagttaatgcgaggctgagtgacgggagaaacgagcggagcctgacgactccgctcattaagggaattaaccttctttttctatcagcaaggcttccagcaaatccaaatcgtgcagtagcttttgcagcgtttcgttgctaattttctgcgtcgcgcgcaaatggtaaagctcgccgcgttctgcccgtaacgcggttaaacggaagcgacgctccagattctctatcagcaaggtattttcgatttcgtctttactgccagtgcgccgccgcaaagtcccgattacccgcgaactgacctccttcagcaattgctcgtcaatattctcttccgtactggccgccagacgttcttccatcttattcaggctaacaatagccacttcggccattgcggccttggcggcgcgaatttcttcacggctgacgcttttatccccaaccacgacgccgcgtagcaacagcggcaaggcaattacccccataatcagcgagaagagaatgacaccggttgcgataaataccagttggtaacgcgatgggaacgcggtgccatcgctcagtaataacggaatggacaacacaccggccagcgtaatcgccccacgcacgccagcaaatgaggcgacccataactcacgggtggtgtactcactaaacaacagcgggcgttttttcatgactcgcttactgatgcgtttcatcagccacagccagctaaaacgcagcatcagcagcgccacatagataatggcgacgtcggcaaacaggttccaggtttgaatagttggatccagctcggcctgtagaatcgaggtttccagaatccccggcagttgcagacccaacatgataaacaccatgccgttgaagacgaattccagcatcgaccatacgctatccgcgcgcaggcgcattgccaaaggcgcattacgaatgacgccggactgactgatggtcatccccgcagcaaccgccgccagaatccccgatacgccaatatgttcagcaatcaaataagaggcaaacggcagtaatagcaggaaaacgatttgcgtcgctggatcgtcaccgctccagcggctcataatacgcagcgatttactgtacagccaggttacggccacaccggccaacagcccgccaatcgccactttcaggaactctagcgtagcgccagaaacgctgaagatcatggtgcccatcgccacggcaatagcaaacttcaacgccaccagaccagaggcatcgttcatcaaggcttcgccttccagcacgcccatgatggattttggaatgcgccctttgcccacaataccggacagcgccacggcatcggttggcgaaagcacggcagccagcgcgaaggcggcaaccagcggaatccccggaaccatccaatagatcaaatagccaacgccaacgaccgtaaccagtaccaacgccaaggccagaccgaaaatctcccgaccgtgatgaataaactcgcgggtaggcgttttccaaccgtcggcaaacagcaacggaggaataaacagcaccaggaatagctcgggatcgaaattaacgtgcaacccaaagtggggccaggcgagcaaagcaccacaaacgatttgcatcagagggagagggatttgaaacggcaacatccgggtgacaacacctgagagtgataccaccaaaatcaggatgaggattgtaaaaaagatttccatgctttccttagactcaacgcgacttaagttctgatcttacccacactcttcaaggggcggggggcctgataggtgatagtagatcacttttttcttcgcggggaaaaaacctgttactgacagcagcaaaagcataaacagcggggagtttgactaaaaatagcggtaaggagaggcgattaccgctccttaccagccagatgaaacagttaaatcagatagcccagccgccggcatagaatgccaccagcgcgatggcaataatcacggtgccgatattcagcttacgccattcgccagagaaaatacggccaatcaccagagagctgaagcccagcataatgccggtaacgatgttgcaagtcagtacgataaacaccgcacacagcaggccagacatcgcatcaacaaagtcgctgaaatccagtttggctacgttgctcaacattaataaaccgacgtacatcagagccggtgccgtagcgtagccaggaaccagataagacagcggagacaggaacagaatcagcaggaataaaataccgactaccgttgccgtcaaacctgttttgccacccgcagcggtacctgccgcagattcgatatacaccgccgccggagccgcgccgaccaaaccggcaaaaatgctgctcaccgagtcagacgtcaaagctttaccgccgttgataatctgcccgtctttatccaacagattagcctgccccgccaccgcccgaatcgtaccggtggcgtcaaacaccgccgtcatcaccagcgccagtacgcttggcaacaccacgggctgcaaagcccccataatatccagactgaaaatcagcgagtcgccgttggcatcagccagacttggcatcgcaaacagaccttggtaagtcacgcttggatcaaaaatcaagccaatgattgaaatggcgataatcaccagcagaatgccacctggcacccgcagtttctccagaccaaaaatcaccgccagacccaataacgtcatgatcaccgggaaagaggtgaaagcgcccaacgccacaggcaaaccttccagcgggtttttaatgaccagaccgacaccgttggcagcaatcagcagtaaaaacaggccaataccaatccctgtaccgtgagcgacgcccatcggcaaattacgcagaatccaggaacgaatgcccgttaccgaaataatggtgaacagtacccccatcaggaataccgcgcctaaagccacgggaatactgatgtgttgaccgagaaccagactgaacgcggtaaaagcggtcagagagatggcgcagccaatggccatcggcaagttcgcccataaacccattaacagagagccaagcccggccaccagacaggttgcgacaaatactgccgtcggcggaaaaccggctttgcctaacatggctggcacaactatgaccgagtaaaccatggccaaaaaggttgtcagaccggccagaacttcttggcgcacattggtattgcgttcgctcagtttaaaaaatgcatccaacgcgcctttcggctttataccgtcgttcgcttgaggattggtgctagacatggttatgtcccctgtgtgtcaacaaatagcctgcacgcggttccgacaaaatcgctttcattactgagcatccatcgagctatttccccgaaatagtcacgctggaaagaaaagcaaacgattagctggctgcgcgcataaccgaaaaaaagtaaggtttattcaaggcaaacgattatctagccatccatagtgactaatcaacaccagatagcgacatttaatgcattttatgacattaaatagccattctcagaaatgtgcgggggatctcatccatagaacgccatttttatgtcgttaaaattgggcaaaagcctgggtgagaataataacgaaaatgccaaacggcacgagcggggaataatctggatcaccggtttccacaaagttcggccaaagccgccaaggggaaaccggttttttatcactggctgacgaaacggctctagcgaaccagttcgaatttaccgccacgctctaccgcacgttggtatgctggccggcggtgaatccgcgccagaaaatcttgcagtttcgggtagcgggatagcccttttcctgcatcgatagcctcaatggggaaactcatctgcacatctgccgcactaaaatctttgccagcaaaccacttattggtactcaagtgctgttccagataatccagatgcgtggcgatctgcttatccaaataatttttctgcactcctttgccgattgctcccgccaccggacgcagtaaccacggcatcggcgggtgtcccagacgaccaaagatcaacttcatcactaacggcggcatcagtgaaccttcggcataatgcatccagtaacgatattgttggcggtcgtaatgatccgtcggcttgaattcaccttgagcatcatatgtttcctgcaaatactcaataatggctcccgactccgccaaagtcatatctccatcggtaatcaccggcgcttttcccagcgggtgaacctttttcaactcacgcggagccagcaggcttcccgcatcacgctgatagcgttttaggtcatagggtacttgcagctcttccagcatccataagatacgctgagagcgagaattattcagatgatgaactatgaccataagaaaactccagagtagaaaagcagagatcggaaaaactgagtatagccgaggataatcgccaacttttattaccttgctaatcagctgataaaagattgttcagccagtcggccataaaggaacgccacaggccaatattccgcttcaatgttatatcagagagcatcgctttgcggtaaacggattcgccatgagaataaataggcgttggcgatattttacttagaggaaggaagatcgataaactcttgctcaatcaggtatttcttgtcacttagcatggttagcgcgccctgaagcgttgctgatatcccaaccagatcacgccattccaccagactgtttttccagatatatttccaccctttcttgcctttgatgtaggttaactggagtagctcaatctgcaccttatctaccgaagcggctgataaataaatgcgccgacctttcagttcataaatcagtttagccctaagcccagccgacaaatccgcattaaagctggcgcaaaacgatgccagtatcccttcaagatcatctaattcctccataccgctaatcatccgcactccccttgcttaacctgcatgattgaaagcctgtttgcatcctatccttgatgttattgaactcccggtcttcatcggtcctatcaagatagggatcctgaatacacccgagatgatgttggcctgttgttatctctatagtggttatgtcagccagagccgcctgagggtgttatcattgctcaaaacttatcatgacatccagcccgataaatggagtccagcgaccaatgactgacgattttaaccgcaccgccaaggtattatccgtatttgactttgacggcacgctgacacaccacgatagttttatcccttttttgcagtttgctttcggcaaaagatactttgtccgtcgtctggtaaaactggtattacctaccattaagtgtcttcgacgagaacttacgcgggatgagctgaaagaagtgctgatcaaaacctacctgaccgaggttgaggatacatgggtccggcaaaaagccgaagagttctgttctctttactggagcaaattaatgcgccctgccgggctgctggcagtagccacggaagtgaactccggagccgaagtcacgctatgttccgcttcaccggcaatggtactgcaaccttttgccgacaaactcggcgttaaacttatcggtactcagcttgaggtaaaagacggtttactgaccgggcgcatcagcggccataactgtcgctgcgcgcagaagatcaaacgtctggaaagtgtgtatggaaatctggctgattatcacctgagagcctggggagacacccgaggcgattacgagctgctggccgccgctcaggagccgcactggcggcatttccatccagtctggtctaaaaagaaatctcgactggcgaaattacgccagaccagcttaaacccgccgcatcagtaatagctcatacctatcagataatgcgtaatgcgccccgactcaggggcgcccaaaattatagaatgcgctcagcaacagcggcatcgtgccagtccttaaactcctctaggagcaggtcataaagccggtcttcttttaacgtggcaaagttatcgatagcaaagaaatgggtgttatccatccgacgctcagtaaagctatccaacttttccagaattccgtaatttgtcccccccagcccaacgaacttccaaaaaatcgggtaattggccgagcgtcgtatggcattcttgatttctcgggttttactgatcccaccgtcagtaataaaaaccacatacaccggcagctcactgcttttaaagaaatcgacaatttcttccattaccggtggctcattgttgacgccgcccaatccaggcaaattctcccacgtcgtacgtttagatgtattttgaatagaatcaatataaccatcgagattatctagcgtgacatccggatatttacggtgccgctcagcaaatccccaaacatccatcgagccatcgtcgtcaaactgtacggctaataccgcgatacgatctagcactgcctggacatttcctcgattaaattgccccttcatcgaacctgatgcatccagcacaaaagccacttttgcttgcactgattgtagtttgtatttattcaggctaacgacggcattttttgccagattgaccaaacgaggcgctttttgttcgagctttttctccaggcttactgttggcgttgaggttgaggttgaggttgaacgagctggcggtggtgtcgttgcgatatcaacgccaaaattgatcgccagcggttccagcccaccgttgaatccttgcccaagtgctcgcagcttccaatgtccgctatatctgtatatctccgccacgatcagtgctttttcgctacgcccggaggtttctacagtaaataaagctacattgtcagtctctgtctcagcggaaaaatgtagttgttgaaggctggcaatggagtcctgcccatcaataaccaatgtaatggcgaccttgctgatttcggcatcaatcttggaaagatccaacgtgattacgctgttttgcgctgcactttgtaaagtcagactcccatccgccgctaccggatgattgaaaaagaaaaaatcatcatctcctctcacttttccgctggcggtcaataaaaaggctgaggtatcaacctcgcttcggaaagaaggagttgttgggtaagaaagtgtcagtttgagtgagttctgagttaacgcgatgttctggccagcctgaagatgcatatctaaagtccttggttccatatcaaactacagtggtcattttcctattatttacgggttttactcataaaaaaccccggtaatcaccggggttttttatcactgcggaaattagacgtttacgccgtgctgggaggccagcgcagataaaccgccagcaaaaccctggcctaccgctttgaatttccactcggcaccgtgacggtacagttcgccgaagaccatcgccgtttcggtagaagcgtcttcagacaaatcgaaacgagcaatttcagcgccagaatcgttgttgtaaacacgcatgaagctgttgctcaccataccaaagttttgtttacgaccttcggcatcgtaaatagtgacggcaaagaccagtttcttcacgtcagccggaactttggccagatcgattttaacctgctcatcatcgccgtcgccttcaccggtgcggttgtcgccctgatgttcaacggaagcacaagggctgagtttgttattgaagaaaatgaagtgagcgtcagacagcactttaccgtcttcaccgaccataaatacggatgcatccagatcgaatccctgaccgtcggtcacacgagaatcccaacccaggccaaccatagcgatgttcatggtgggtgcttctttagtcagggatacgttgccgcctttaacgagagaaactgccattttaaagctcctgcttataattggattattgggcaacgacttgctgcccaagtattaaacggtggcgattagaacgcgttaataccgtactgtgcgcagacggaagccagaccgccagcgtaaccctgacctactgcacggaatttccactctgcgccgtgacggtacagttcgccgaacagcatagcggtttcggtggaagcatcttcggttagatcgtaacgagcaacttgagtctggttgtcatcattgaccaaacggataaatgcgccagaaacctgaccaaagttctgacggcgagtttgtgcgtcatgaatagtgactacgaagacaattttgtctacgtcagctggaatatgatccagcttgattttcagggattcatcatcgccatcgccttcaccggtacggttatcaccggtgtgaaccaccgaaccatcggcagatttcaggttgttatagaaaatgaagtctgcgtcgccgcgtacttttccgtttgcagccagcagaaatgctgatgcatcaaggtcgaaatcctgaccatcggtagaacgtgcatcccaacccagtccaatcaggacattcttcatggttggagccgctttgctcagggagacattaccgcctttagataaagaaacgctcatgtgagtaacctcttgagttgatatttttcgaattcaaattcaggaatcggggatcagttccccttttcttcctcagggtccggtttgccagggaacattacgctggcaatgatacctaccgccagcacacccagaaccacaaacagactcgtggtggctgaaatgttgtaaccgtggtgccaaatgtgatctgttgcattcaaacccagtttcgcggcgatgaagaacagcaacgcaacaacggccttttcgaggtgaaccagatattgtttcaatgcttccaaaacaaaatacagcgtacgcagacccaaaatagcgaacatcatggcgctgtaaacaatcagaggctcgcggctgacggcaataattgccggtacggaatcgaaggcaaacatcacgtcagacagctcgactaccgcaacacacagcatcagcggggttgcgtacagtgcggctttggttccacgccctacggtaacgtcctgattttccggcttcgccagttcttcatcaacttctttctgattcagcaagaaagcatgacctttcaacttcggccaaatcgggaagaagcgttttaccatgcgataagccagatgctgcgaataatcttcaatttcatcgctttcgccgccgcttctcagcatcatcaccgctgtccaggccacaatcagcgcaaacacgatttcaacataaggcccaaggctcaatagcccggtaccgatagcgacgaaaatgccacggaagaagattgccccgataatcccccaatagagaacccggtgacggtaacggtccggcaccgagaaccaggagaagatcgccatcatgacgaacaggttatcgaccgagaggactttctccaacgcataacccgtaacgaacaggctggcaacttccgcgccgtgatgaagatataggaagccggcaaacaccatcgccacaaagatccagaaaatagaccataaagcggcgcttttcagcgaaataggcttgtcatggcggtgcatgaacaggtcgataaaaatggctcccacagacaaagcaataaagacaatgactgtttcagttgggaagccgatatgcgtggataccatatataacccttaccaaatacttatattcagaggccgaattcagcaggctcaaagcccagtgcgacggcgatttcacgaactgcctgttgttcattctggtcaaagtcaccgtcacttttcgcgacggcaatcccgactcgaatcgccaactgagcggcttcaggctgatctttcagagcaagaatgtgcttcatggtttcccctttgccaatttcgagatcgaaatcgaagctggaaaccagtttgttaaagaattcaataacctcagaggtatcaaacacacttaactcatcggatgcgcgcagaaaaccaatcatcttctgtttttcttccgcgctaacgccgtcgctggaaaccgcaatacgtgcacacacggccacggtaccttgcatgaattttttatttttgaagcgactaacctgcttagtcagctccgcacgacccgtattgaatgcgcctttaactttgttgaaaaaactcattctgtattccttattattgtctgaaattactttgaacccgctttccaacggaatccccagccaagcgctttatccatatcgctgtggtctttaaagaactggttgatacgttcaactttgatcgttccctgctcgttgaccaaccgggcaatggcacacatgttgcggctgtttttcccctcggtcatacgcgtttctatcggcggttgatctggaatatggatagtgacgacgccgtcggtattatcccagctcgcgacaccttcgtagataaaggcgaaaaccaatacctgacgaatattcttccattcccgaccgttgatatgcagccattcgccctctgatacatccccggtacgatcgtcgccctgcaattgcacgaaaggttcctgatggtacgaaccaaagccgttccccaaagcctgaaccaccgacttatggccatcatccaactcgacgaaagcgcctaaatccagatcaacacctttcttcgcgctaaacatgctgcgcaggccggaggaagagctgccgcgatgccagttcaggttaatgcggatttcgccaaagttgtcacgcttcgcgaggcttatcgctggtttatctttggtgagggaaactttgctcaggttgatcttagccggagcgggcgtgggtgctggagccggaatcggcgcaggtgcaggtgcaggagtatccgcaatatcgacgccaaaatgctcagccaatggcttaagaccgccgttgaagccctgcgcgatgaagcggaatttccattcgccgttacggcgatacagttcgcccagaatcaaagcggcttcctgacggccagtcagttctacgttgccgcagatcagcacgtcgtttccatcctcaacctgcaccgacaaacgttgcagaccagaaacggtctgattgccatcgcaggtcaccgtaaacgccactttctcaacgtctgaacgcaatcgcgtgacatccacggtaaacagagtgtcgttgccttgagcaaccaaactaacggtgttgtcgttattaacaggctgaccgtaaaacaccatatcggcgtcaccctgcacttttccgttggcaaacagccgaaatgcagaggcatcgacgggtgcgccggataacactcttaccgtcaatgacttagaaggtacgggggcattgccccctggagtcatattcattagcgcaccacggtagcaacaatatccgaatgcatatcgtcaatagtccgaccgcggcaggcgtgaccatgagcggtaaagtcccattgcccgttgttacggcgcagtgacgcaataacaataccggtatgagccccctggtcggttagctggtaacgagccatttctttattatttccccgatccacgacgcggcagaatgcgttatctacgtcattaaacgtctggccgcgaaagctgttaacggtgaacgcgaggtattcaacctgatgtggtaagcggttcaaatccacgcgaatgacttcgtcatcgccgtcgccttcaccagtcagattgtcgccggtatgaacaacggagccgcaagacgactctaatttacggaaccagatagtatcgatggtattaccggatttatccattaatacacaacccgcatcaagatcaatggaattatttccgccaaaaaggctgcctaataacccttttttcttaattggatcccagcctaaaccaaattgaagttggctaagagaagaagattgtttactcagtgagaccgtctggtttttgcttaatgaaaccatattttatattccttcaacaggatatgaaaaataaccacattttttacattaaagtcgtgaatccaaaaatcatatcatgatgaagttcttgaacaagttaatttttagtcattatcgttaacaaatcatttatttgaatgatatataagatattttatttttatacccttagcggaataagcttttttgccatctaaaatcttttcatatctttacattataaacacaaaaaatataagtcataatatgattgacatacaaaaataacgtccatagactctcggctatttaattcgcctgtcggccctgcgtggaaatagatatcaatggcacataaaatttggcttatggaaggtttgtcctcccaacgggatattattcagggcattaatactttcgctaaaaataaagatacggacattttcgttattgcttcccaccgtaatgaacgtaatgaaattctgtcgcaggcggacttggcagtactggagccaaaagaagaagaacagcgcctttcttttattctctcactggttaaaagacttgatattcaggccatccataccgggcgcaattccctatggttcgaatcccatcgcaacgaaattgaatgttccggcgtaaaactcactaccggagcccatagcgtggcgcggcttgaactggcggatgacaaagtgagttttgcccagtttatggagcagcaaaacctgccggtcgtgccttctattcgcgtggaatcactgtccgaattattccatttcatcacccactctccctttggtttaaaacctttgtgcgtaaaaccggtaaaagggatttatggcatgggattctggcgcttcgatgacaaggtttcggctatggcggcgtttacgcatccggaaaaccgcagggtgaatccgcacttgtatcttcgcgccctcgaagaatcggatagttttgaaccgctggtgttgatgccctatctgcctggcccggagtactccgttgatatgttggttgagcgaggaaaagtgctggcggcggtggctcgtcgtaaagaaggtgctcttcagtctctggaaaacgcaggggaagcttacgagctggggagagcctgtgccgaggccatgcaggctgacggactggtcaacgtccaaacccgccacaatgacagcggcaaacccgagttacttgaaatcaatatgcgcccttccggcggcatcggctacacgcgattcagcggcgtcaacctgccgggtttgtttgccctgcgccaactgggattaatgagccagcaagaagtgatggacgaactccgtagcgcattcacccccgctatcgttcgatccattaccgacgttgtgcgttatagcccaaccttgaccaacctactcccgcaggaatagtcaccatgaataatcactctggccttcagatataccgcagagagctttcctgcggcactctgagtgtgacgccaaccggaggcatcaccaccttcgacgacctgttcgaaatagcagaaaggcgtaatcctaaacgggcatttctttttgtcagcaaagtgcttggcagacatataccggtttcgccgacggtaatgcgttcggtttaccgtcagttaggggaacaaattccctccctgacgacagggccggtgctgtttattggcatggctgaaaccgccgttggcctaggagccggagtgtttgatgaaattcgacaccgtgtggccgagccggtctatctcacctcaacccggcatccggtagagggcgagttactgtgtgaattcaaagagaaccatagccacgccaccgatcatttgatttacctgccgcaagacgccgagctgcgccgccgggtattacaagccaaaaccgtggttttaatcgacgatgaagccaccaccggaaatacctttattaacctgctcgcggcattaagagagactgcgggtctacaccatattcagcaggtgattacggtcacactgaccgattggagcggtagttccatcgcggaacgctgcccgctgccggtgcaaaccgtttccttggcgcagggaaactggcactgggagaaaaatcctgacgcacctgtgccaatcatgccttctgtgaatatcaccgcttccggcaacgtcccgataaccggtaaacaaagctggggacggatcggaatgaatgagcctgagaatgatcttgggctatccattcagacgacggaaggagaaaagctattggtattgggaagcagcgaatttgtctgggaacccttcttactggcggagcggctggaaaaacagggagcagaggtcaaatacagttcaacgacccgctcaccgattgccaccagcttcgcgatcgaatcggccattgccttcaccgataattacggattaggcatccctaactttgtctataacgtggctcatcagcgttttgaccgaatcttgctatgtatcgaaacgccgacagaaagcgtcgatcccgcactgctggaggcgctgaaaaaagtggctccctccgttgaggttatttcctatgaataagccggttattttttccgatctggatgacaccctgtttcaaacgcgccgcaagatggtgaatgagctggatttgcagccttaccgcaccggtgccttggatcgcagcctggaaccgcgcagttttatgacggaagaacagaccatgctggtggattggatgctagagcatgccgagctgattcccgtcaccgcgcgaggaaccgaggaaatcgctcgggtcactattccgtttcgttcatgggccgtgaccactcatggtgccgtgattctcgatcctcaaggccagccggacgaaggctggaaaacgcagatgctggcggctttacagccttacgcagaaaagctagtcactatgcagcgtcaaatgaccgaactcatggaagccagaaatatcaacggctgggcgcggctcaattacgaatataaccatacgccgatctatctggtgatgaagcatcgggacagcaccaaactggatgagctaaacgcgattggcgatgaaattgaacagattttctcaaccgacggtttctatattcatcgcaacagcaacaatattgcctggctaccggagccggtagagaaagggttggcggtcacttatttactgaacaaactgcgggaggaacggggcgtatttccggttatcgggctcggtgacagcctgagtgaccaccgtttcatgaaactctgcacctggtatggattgcctcgccagagccagtttgctgaaagcatcgccagcaaaatctttggagaaaaataatatgcatgatttcatccctttttccggttcctatctaccggaagacgttcatttcctgctgaaaccggtcgaaatcgaaatgacaccggtggaacaaaaagaacggttgattcagtctggcgcacgccactattcggaaatgctgagtcaggaaccggagccaacctcttggcacttagatttattcacccgcgctctcgataacggcgcagatcgtcttgccaaagaagtggtgatgctggctaaggccttgattcaacgtttcggcgatacgccgattgtattaaccagcctggtgcgggcaggtgtccctctgggcgttatgctccaccaaacgctgcgggcaatgggaaaggaatctcatcattacggcattagtattatccgcgaccgcggtattgataccgttgcgttagattggattgaagctcgccacggtaccgaaggcattgtttttattgatggttggacggggaaaggagcgattaccggcgagttagtgcgttcgctaaaagatcggccaggctatccagaacagcctcgtttagtggtgctggccgatccctgcggatgttcgtggcttgccgccagcgacgacgattggttgattcctttcggcatcatgggcgcaccggtttccggcttaatctctcgctcgatctggtcggcagaagggctgcacggctgcgttcaatgcgatcacctcagccaatatgaatgtagccgtaagctggtgaataccgtagcggcatctcgccagaccttagatcttgccgccatccccgccagcgattgggattctcagcaaaaaacctatctaaagcagcgcagcgcacaagttatcagtgcgctggcagaaaaatatcagatttccagcgtcaaccgtattaagcccggcattgccgaagccacgcgcgctgtattacgtcgtgtgcctgatcatgttctggtgcgctccgtcaatgaccctgatgtcgctttgctggtttatctcgcccgcgagaaaggaataaccattaccgaagtcggtgacgagattggtcaataccgcgcagtcacaatcattaaaaaggtactctgatgaacaaacggctctccccttggcatttgggcgcgacattgtatatgcctgctacccgcacagacattgccgaggccatcttacataacaaaattagtgggttacgctcgctggttatctgtctggaagatgcggtaaacgaagctgatattcccacggctttaatcaatttacgtgagctgctagcggttctcgctcaggccaaggctactgatggcaatagccattggccgctggttttcattcgcccaaggcatattgaaatggggcaatggctaacggaaagtctggatctcagcccgatcgatgggttggtattgcctaaattcactttggcgtcattgcccgagtggtgggcaatcatacgagatagccatttatgcatgatgcccacgctcgaaaccgaagaggttttcgacgtcgttcaaatgcgccagcttgccagtgagctacaagctcatccttgccatcagcgtattattgctttgcgtattgggggcaacgatctgatgaatgtgatttctttgcgacgaacgcgtgatttcactttgtacgacggccctatgggttatgtgattaagatgctggtggccgttttttcctcgcgggattttgccctaacagcgccggtctgcgaacacattgatgaccatcaggtgatgaataaagagctggctcttgatatggctcacggtctggttgggaaaacagccattcatcctaatcaaatcagtaagatagaacaggccttaatggtatcacccacggattatgccgatgcattacgtatcctgaactcaacccaggccgtatttaaatctcagggatcaatgtgtgaacccgcaacccaccgtcgctgggcctccggtatcctcgctcgcgctcaggtttatggtattagtgcggaaccggggcaagacggcgtacgtctcatgaccgtgactcagaacagctgaagggaacagcatactgatttatcttaaatttaggatcttcctgatattatacacgccgcaaagatcgaaaataccgagttggttggcctcctgtggcacaaaaaaacaggggaaaccatcttggctcgaaacaggattatctgttgaggctggccggagtcgtcatttatgcactactctttgaagcggtgaacatctcaggattaaccaaatgcatcagcaagataacgggaaaccatctggttatcaggaagatgtccaccgtctttatcttcccggcaatagaattcttgaccatgaatgcaggcggtaactaactatgcaactcagcacaaaacaggctcgaatcttcacactggcaaatattctgggttcgggaaaaccagtctctgccattcgaattatttcgtcccttgattgttcagagcctacgctgacccgcgcgctaaaagaactgcgtgaatcctattcagctgaaataaagtacagcaaagccactcattcttatcagctggttagccccgggaatctggataaaaaagccttacgtagtatggccaaagtactaaccgcccacgcggagtcaaaaaacaacgaggtggttagtcgagtgtttcttgataaggataaaaagcgagcggtgtcgctttcgctcaaaggatctatcttacgtaaaatagataaactgtcccgattgatcgaatccacccgtagcgaagccgtagaaatgcttgccaataactgcattgatgatttgatccgtcatctccaaaccgccaaaaaagagaaataattgccggtttctcaaaaagaggatgaattagtctttgaaggccaattcatctccccggtacgcctgtaatctgcccgtaacctctagcgccaaaaccaagactctaaaaaaagtgaaagcgtattgcggcatttcagtcaaagcccgtatccgattgcaactgccagaaacgaaaaaacccagcgattacgctgggctttgatgttttatctgtgtttagatgacgccgataagaacccgaggatcagaacgggatatcgtcatcaaaatccattggtggctcgttgccgccctgctgctgtggcgctggagcagactgcgcctgacgtggagcctggccgccgctgaactgattgccaccctgaggttgctgaggctgaccccaaccgccctgtgcgccatcgttggaaccaccctgcgcgccgccagcaggagcaccgccgccttgacgaccacccagcatttgcatggtgccgccaacgttaacaaccacttccgtggtgtaacgttcctggccgctttgatcctgccatttgcgagtttgcagtgcgccttcgatataaacctgtgaacctttacgcagatattcaccagccacttctgccagcttgccgaacagcactacgcgatgccactcggttttctctttctgctcgccggtttgcttgtcacgccagctttcggaggtggccagtgtgatgttggcaactgccccaccgttcggcatgtaacggacttccgggtcttggcccaaattcccgaccaaaatcactttgtttacgcctctgctggccatgtgaactctcctgatgaagtaaatttgtacagtataaacgagtaagtttaacacgctagagcctaaacggcactgccgatcgttactgcgggacacattccagtttagcaaaacaatcagcctgaattgcagccatatactggatattcattcaggtttttttgtgtcataattatccgtttcgtactggccgtgtcctttttctggcgttgcaaagtgcattttttacattaggctgcgcaataaaggacacggtgagaggctcagtttaatccgggaaatgtttgtatggataatatcgaagttcggggcgctcgcacccataatctcaagaatatcaacctgattatcccgcgcgacaaactgattgttgtcaccggcctgtctggctctggtaagtcttcactggcgtttgataccttatatgccgaaggccagcgccgttacgttgagtctctttccgcctatgcgcgccagtttctgtcattgatggaaaaaccggacgttgaccatatcgaaggtctgtctccggccatttctatcgaacaaaaatctacgtctcataacccgcgttccactgtcggaaccattaccgaaattcacgattacctgcgcctgctgttcgctcgtgttggggagccgcgctgtccggatcatgatgttccgctggcggcacagaccgtcagccaaatggttgataacgtgctggcacagccggaaggtcgtcgtctgatgttactggctccggtggtgcaggatcgcaaaggcgaacacaccaaaacgctggaaaacctggcgacacaaggctatatccgcgcgcgcatcgacggcgaggtttgcgatctttccgatccgccgaagctggaactacagaaaaagcacaccattgaagtggtcgtggatcgttttaaagtgcgggaagatctggctcagcgtctggcagaatcctttgaaacggcgctagagctatccggcggcaccgcgatcgtggccgatatggacgatgcaaacgccgaagaactgctgttctccgccaattttgcctgcccaatctgtggctacagcatgagcgagctggaaccgcgcctgttctcctttaacaacccggccggtgcttgcccgacctgtgatggcttaggcgtacaacaattcttcgatccggatcgcgtgctacaaaaccctgagctctcgctggctggtggtgcaattcgcggttgggatcgccgcaatttctattatttccagatgctgcgttcactggcagagcactataaatttgatattgaagccccgttcaattccctgagcgcggaaacgcaaaaagcagtgctgtacggctccggcaaagaaagcatcgaattcaaatacatgaacgatcgtggcgataccacggtacgccgtcatccgtttgaaggcgtgttacacaacatggaacgccgttataaagaaacggaatccagcgcagttcgggaagaactggcgaaatttatcagcaaccgctcctgtgcttcttgccacggtactcgcttacgtagagaagcgcgctatgtgtttgtggaaaacaccacgctgccggaaatttccgaattaagcatcggccacgctctgaccttcttccagaatatgaaactaagcggccaacgcgcccaaattgcggaaaaagtcctgaaagagatcggcgaccggctgaagtttttggtcaacgtcggtctgaactacctttccttatcgcgttccgccgatacgctatccggcggcgaagcccagcgaattcgcctagctagccagattggagccggtttagtcggggtcatgtatgtgctggatgagccgtccatcggcttgcatcagcgggacaacgagcgcctgctggaaacattgattcacctgcgcaatctgggcaataccgtcattgtggtcgagcatgacgaagatgcgattcgcgccgcagatcatgtgattgatatcggcccaggcgctggcgttcacggtgggcaagtggtggcagaaggaaccgtcgatgacattatggcggctccagaatccttaaccggccagttccttagcggaaagcgggaaattgcggttccagcgcagcgtgttcccggcgatccgagtaaggtgttgaagctaatcggcgctaccggcaacaacctgaaagacgtgaccttaactctgccggttggcctgtttagctgtattaccggcgtatccggttcgggcaaatcaacgctgattaacgacactttgtattccattgcacagcgtcaattaaacggcgctaccattaccgaaccagcaccataccgtgatattcagggtttggaacatttcgataaagtcatagatatcgatcaaagtcctattggccggactccacgttccaacccggcaacctataccggtatctttacgcctgtgcgcgaattattcgccggggttcctgaatctcgcacccgcggctataacccaggccgtttcagctttaacgtgaaaggtgggcgctgcgaagcctgccagggcgatggcgtaattaaggtggaaatgcacttcctgccagatatttacgtcccttgcgatcagtgcaaaggtaaacgctataaccgtgaaacgctggaagtgaaatacaaaggcaaaaacattcacgaagtattggaaatgaccatcgaagaagcgcgggaattctttgatgcggtacctgcgctggcgcgtaagctgcaaacccttattgacgttgggctatcctatatttgtctggggcaatcagcgacgacgctgtccggcggtgaagcgcagcgcgtgaaactgtcgcgcgagctatccaaacgtggcacagggcaaaccctgtatattcttgatgaaccgactaccggcctgcattttgccgatattcagcaattgttggcggtattacaccagctgcgcgatcagggcaataccatcgtggtaattgagcataatctggacgtgattaaaaccgcagactggattgtggatctcggcccggaagggggcagcggcggcggtgagattttagtatcaggtacaccggaaaccgttgctgagtgcgaagcttctcataccgcgcgtttcctgaagccacttttgacgcgtaaataaaagcgcaataaaacgtgctatcggggggcgagttcatcgcctcccgctctgctgactctctaagatcaagcgcgtaattcttgccgaatctgttccgataaaccttgtaataccaattgataagagccatcaatcaacgcatagaattgagaatttggcagctttccatccagaaacaccgtgttccagtgcgctttattcaagtgatcactcggcacgatctccggatgctttccacgcagttgttctgctaattccggactacttttcaatgaaatagcaggacgcccccgtacctcgctaaccatggcaaacatcacatcgccaaccttaatctgattcgcctgccactcttcatgatcgctttgttccgctcccggtttagacatacagtattcgagtaatgtcgaattattcattcgcttatctcctgttatctggccgcattcagccataaaaaccgactattccaaagacggatttcctcagaatagtagccagagagcgttagattttcgctatccggttttctgatcatgcagtaatgccgtgagatttactgtgatcgatagatagccctgacattcctgacattaatgatgacacctactatcagtatattctttaatcatcccaccacaacccacgcatcaggaataggccatcaccttctgttcctcaatagaaaagggcgatatctctatcgcccttaggtacccaacacaatcagatcagatcagcgaaaattcactcgccatctgttgagtatttaaacaaaacggatttactgcacggcggcaaacgcagcggctacctgctgaacattttggtgattaaccccagccatgcacacacggccactcgcgatcaggtaaacaccgaattcttctcgcagacgatccacctgctgttcagtaaaaccggtatagctaaacatgccgcgttgagtcagcaaataatcgaagttacgctgcggcagcgctactttcagtgccgcgaccagagtgttacgcatttccagaatacgggtgcgcatttgctcgacttcattgcgccactggctgcttaattcttcgtcattcaagaccttagccacaacctgcgcaccaaagttcggtgggctggaatagttgcgccgaacagtagctttgagctgccccaacacgcggcctgcggcttcttcgctttcacataccacggataagccgccaacacgctcgccgtacattgagaaaattttagaaaaagagttgctgactaaacacggcaaaccttccgcggccatctggcgaatggcataggcatcttcattcagaccagcaccaaaaccttgataagcaatatcgaggaatgggatcaattcccgttctttggcgatcctgatgatctgatcccactgatcgttagtcagatccgagccggtcgggttatggcagcacggatgtaacagcacaatgcttcttgccggtaactgctgcaaagtggccgacattgcctcgaaattaacggctaacttttcattatcaaagtacggataggtgttcaccttaaaacccgcaccgctgaaaattgcaatatgattttcccaggttggatcgctgacccacacttgagaatccgggaagtagtggtacaggaaatcagcccctacattcaacgcgccagacccccctacggtttgaatagtggctatacgactttgttccagcatcgggtgatcttgcccaaacagcaaatgctgaatagcagaacgataagcctgcaaaccttccatcggtaaatagaccgacgcagcctgtggctgagcgctcatttgcgcttccgctgtggctaccgcctgcaattgcgggatcacaccctgagcatcgtaataaagcccaatactcaggttaactttatgctctctggtatcggctttaaaactttccatcagcgaaaggatgggatcacctgcataggcatctacattctggaacacggcattactctccttaattaggtgcaaccaaaatagcactaacttaccctgccaggctactcaggaataaaagcgtttactgaaagtaataaataactttacctcatgttttataatgtaattattaggattctctctctaaaaaactcaggaatgagaaaataataatcagtgaggtattcggctctgactaaaacgaaaaaggcgcacatatcgctatgccgcgccttcagatgacttgctaaatcatgctcggtgaaactattcgccgatatattccattgatacgcgagacgttagtttggtaatcaattcataagcgctgataccggtagcgatagccactttttccactggcaaatccgctccccatagctccacttcatcacccactttatccctagaatccgggccgagatcgacagaaatcatatccatagaaactcgtccaacgagcggcacttcgcgaccattcacccacaccggcgtgccggacggcgcgcttcgcggatagccatcgccgtagcccatcgccactacgcctaaacgcgtatcccgcgggctgatccaggttccaccgtagccaaccggttcaccggttttatgctcgcgtaccgcaatcagactggatttcagcgtcatcaccggttgcagaccaaaatcggctccggttttctgctccatcggggaaacaccatacaatataatgcctgggcgaacccaatcgcgatgggattccggccacagcaagattccgccggacgcagcaattgactgtttacccggtttcccagtggcaaactcatcaatgcactgaatttgcagtgttgttgccgagacttccggttcatctgcgcggctaaagtggctcataatattcaccggctgaaccacattcgagcaagcgctcaggcgctgataaaacgcttcggcctcctccggacgcacacccagacgatgcattccggtatccagtttcatccagacattaatcggataaggtaaatctgcctgttctaatgcttccaattgctcaacgctgtggatggccgtttcgatatgattgaccactaataccggtaaatcctcagcggaaaagaaaccttccagcaataagataggtttcacgatcccgccggagcgcagcataagtgcctctccgatacgagcgacgccataacaatcagcatcttgtaacgtgcgcgcagtttctaacagcccgtggccataagcgtttgctttcacaacggcaatcaggcggctttgcggcgccagacgccgaacctgttgcaagttatgtcgcagagcgcggcggtcgattactgcggttgccgctttcattttctatccttaattatcaatatgtacccaagaaaattggagcttcagctcaattgaagacgaaccacccaataagctgaattaagcaagaaattcatgtaaatgaacgttaactaactaccttaaaactccagattcgctggggattattcgtcgtcgtattgcggaccggcataattatcaaagcgcgaccactgaccgttgaaggtcaaacgaaccgaaccgatcggaccattacgttgtttacccaaaatgatttctgcgatgcccttcatatcgctattttcgtgataaacctcatcgcgataaataaacatgatcaagtcggcatcctgctcaatcgagccagattcacgtaagtcggagttcaccggccgcttatcggcacgctgctccaggcttcggttaagctgagaaagcgccaccaccggtacctgtagttctttcgccaacgccttgagggagcgagaaatttccgcaatttccaaagtacggttatcagaaagcgcaggtacccgcatcaattgcaggtagtcgatcataatcatgctcaggccaccgttttcacggtaaattcgccgcgctcgcgagcgcacttccgtcggcgtcaggcccgaagagtcatcaatatacatattgcgtttttccagcagaatacccatggtgctggaaatacgcgcccaatcctcatcatccaactgaccggtacgaatgcgggtttgatcgacgcgagacagggacgcgagcatacgcatcataatctggtttccgggcatctccagactgaagataagcaccggtttgtcctgcatcattgccgcgttttcgcaaaggttcatggcgaaagtggttttacccatcgacggacgcgccgccacgatgatcaaatctgatttctgtaaacccgcggttttcttatccaaatcctgatagccggtagaaacgccggtcacgccatcatgcgggcgctgataaagttgctcaatacgcgcaacggtatcttccagaatccggtcgatacttttcggaccttcatctttattgacgcggttttccgcaatctggaataccttggattcggccagatccagtagatcttcactggtacgcccttgaggatcgtaaccggcatcagcgatctcgtttgcgaccgaaatcatttcgcgtactactgcacgttcacgaacaatatcggcataagcgccgatgttcgccgcacttggcgtattttttgacaactcggccagataagcaaaaccgccgacggactccagatcccctttctgttccaatgattcggaaagagtgatcaagtcgatcggcttgctcatttccagcaagcgttgcatttcagtaaagatccggcgatgagggcgactgaagaaatcgttgctggtaactcgttcggaaacgttgtcccagcgttcgttatccagcatcaaaccgcccaacacggactgctctgcctccagcgaatgaggcgggagtttcagcccttccatctggcggtctcgtggctctgtcgtattgttggttggtttttttcctgccatgaagagtgttctttacccggttgagaatagaaaatataacgacccagtatacgcgatgataggcagcgagtaattatatacccgttgaattagctatcgcatatcggtattagcctcatggttataaaggtggaaccgccaacatcttagctgtagggttaaatgacttccattatgaggatttcacatggccaagcgtattcagttttccacaaccggcggtcccgatgtgttgcaatatattgattttacgccaaaggatccggaagaacatgaggtgcaggtggaaaataaagccatcggcattaactatattgatacctacatccgcagcggtttatacccgccagcccagcttccaagcagcttgggaaccgaaggggcgggagttatcaaaaaggtcggttcggcggtgagcactttaaaagtaggtgatcgcgtggtgtatgcacaatcagcccttggtgcttacagtgaaattcataatgttccagccgaaaagatcgctctgttgccagataacatttcttttgagcaagcagcggcctcatttctgaaagggttgacggtgcaatatttgctacgtcaaacctacgaaatcaaaccaggagaaaccttcctgtttcacgctgccgccggtggcgtcgggctgattgcctgccaatgggcaaaagcgctgggagccagactgattggaaccgtaggctctgacgaaaaagccgagttggcaaaagcggcaggagcctgggccacaataaactacgctaaagaaaatatctcgcaacgggttatcgagctgactcaaggggaaaaagtaaaggttgtttatgattccgtcggaaaaagcacttggattgattcactcagcagcctgcaaaagcgcggcttactcgtaagtttcggtaacgcttccggcccggttaccggcgtggatttaggtattctcaaccagaaaggcggactttatgttactcggccatcgctaaattggtatgttaccaatcggcaggaacttgagcaggccagcagcgagctattctcactgattgcctgcggcgcgattaacgtcgatgtagcaccagagcagaagtttccactgagtcaagcccaacgggcgcacctgatgctggaaggcaggaaaaccaccggctccagccttctcattcctggaaactaacgattaactgacgtttattttcggcaattatcctgatttcagccagtaaaaaagggttcccgcaaaggaacccttttttataacgcattgatacagtgtaggggtacagcagtgtattccgacggaaaagagtgcggcttatgccactattgttattcccggcgaagatgaaaatattgatacaagaaactatcgattcgcatcctagcagccagttcaggcaaaaaaaacgctttaaccgcaaattagcggataaatgtttcaagctgtgatcacaaccgcaaaacctctgttcaacttttcttcagttgcatttatttcatgtggtttacacaagaaaaacttatcttaacattttgttctttctgccatttagccgacagaagccgatcgatattccatcaattatattagtagcgacgaatagtcggattctgcatagcgcgccagatccatacaatcgcaacggctaaaatcagccacggtaataacttaatcatcatcacaaataacccaccgaccatcataaaagcagccgcaaccagcaaagcacctaaaatgcccagcagggaaataccggtcaccatcagcatgatgaaaaaaccgataacaaagaaaatctctaacatggttggctcctcaataattgttatcatccaaaatattggataatgctgattgggtattacaagaagcgtgccagcttatagataagggctaattgactgaattaaatagagatgaacaattgtagcccgctaaagaacataacgggcttggtcattttgactaacttatagtgaattatgttgaggctgtttcactaatgataaggctttctctaccacggaaacatcggcgccaggcttatgagcattctcgcttaaatggcggcgccactgacgcgcaccgggaatgccctggaagatgcccagaatatgtcgggtgatatggcctaaataagccccacgcgctaattcttgctcaatgtagggatagagagcctctaccgccgctacactatccgtaatcgccgcctgtggatcgaagagttcgcggtctacctgcgtcaaaatactcggattttgatatgcctcgcggccaatcatcacgccatcgagatatttgaggtgttctttcgcttcatccaaggttttcacgccgccgttgatggcgatggtcaactcggggaaatcacgctttagctgataaactcgcggataatccagaggtggcacttcacgattttccttcggactcaaaccggatagccaggctttacgcgcatgaatagtaaacatatcgcaaccgccctgctctgagactttctgcacgaaatcacacaaaaactcgtagctgtcctgatcgtcaatgccgattcgggttttaaccgttaccggtatggaaaccacatcgcgcatcgctttaacacaatcggcaaccagctccgcttcccccatcaaacaggcaccaaagcgaccgttttgcacccgatcggaagggcaaccaacattcagattaatttcgttataaccacgctgttccgctagtttcgcgcaatgggctaacgcctgcggatcgctgccgcccaattgtagcgctaccggatgatcttgctcactgtaagccagataatcagccttgccgtggataatggcaccagtggtgaccatttccgtgtaaagcagcgcctgtttggtcagcaaacggtggaaatagcggcagtgacgatccgtccaatcgagcatcggcgcgacggagaaacgttgtaatgggtagcctgaatgaccagtttgggcgttagatacagtctgattttcgtgcatgtgcggtgagtttcatcggttgttattacgtcaattcccgctgttttggttgcatagcaaatcatcagtgggctggaatgcgggattataccatagaacctaaggacgcattccagcgcaataatcttacgacttaacctattgatctatgcggaaatgtgacgcggatagaggtaactcacggcgcctatcggcgatcacgcggagatatgttaaaattgcacaaataataatgttgcgggacgattatcatgacttcaatcaaccaagaaaagctgcttgctcaggccgaaagcctgtgtaaacaacgaaatgtacggctgactccgcaacgtttggaagttttgcgtctgatggcacagcaaccgggcgcaatcagcgcttatgatctgctggatttattgcgggtttccgagcctcaggctaagccgccaaccgtctatcgcgctttggattttcttttagaacaaggatttatacacaaagttgagtcggcaaacagctatgtgctgtgccatcattttgaggagccgctgcacacctcagcgctgtttatttgcgatcgctgcggtttggtaacggaaaaaaccaccgttggtattgaagaagccttagctttgctggcgaaacaatcaggttttgcgctgcgtcacagcgtggtagaggctcacggcctttgcgccacgtgcggcgaagtcgaagcctgtgatagccatgaacattgcgatcacgaccatagtctagtggcaaaaagaaagtaaccttggaaaagtaacccctggtgcagaaatcatttctgtcgtcatacggcggcagaaataaaataaaaaatggtttgtcgtcatgactcactgtattaattaacattgtattgattgacattaattataaccaacactggaagtgtcagcacctccttgtgcttgcaacatcttaatataaaacatgtaaacttgatgatattaaattatattttaataaataactctatttataaaatatcgacacatttaataacaccgtggagggaggtaagttttatattcatatattaataccaactcaggttaccagcgatatttggtatgatcttcccaagctttcacttctttttccgcagcttccttctgataaccgtatttttcctgaattttacctaccagctgttcgcgtttcccttctatcaccttcaggtcatcatccgtcagcttgccccatttctctttaattttccctttaaactgcttccagttaccgtcggcttgatctttattcataatatctccgttaacttttgttagctcagtttatttaattcctattaatatataggctaatataattaccagtaaattaataagacaatcttaaattgaatcgttgtcttattcttaccgtgaaataactatagcagagcattctgccgatggctaaattagtactatggaatagtaatgaaatagtaggcaggctaagaaaacctcatattattctgtatttaaatcagcaagtaactcgttattatcggatagttctcaatattactaaaacactgtcatgtgagtgattaaccaatatatatgccttcatttctgatgagatacaggattatttgagtcgtagcacacataataaaaccccaatgaaggggctttatttaagggataaaatcaattgctattaacgctaactaccgcaggtaggaatacgtggttcgttaaatccagtcgccattgcggataacgccaacggctaaaccttcgatagtaaatgtttgctcgcgcagatcgacgacgatgggctgaaattcactgttttcaggcagcaactgaacaatattaccttgttttttcagacgcttaacagtaacttcatcatcaatacgcgccaccacaacctgcccattgcgcacatcctgagttttatgaaccgcaagcaaatcaccgtccagaataccgatatctctcatagacataccgtttacccgcagcagaaaatcagcattaggcttaaacagcgaaggatcaactttatagtgaccttcaatatgctgctgcgctaacagcggttcgcccgcagcaacccggccaatcagcggcaggccttcttcgtcttccattaataggcgaataccacgagaagcgccggagacgatctcaatcacccctttacgcgccaacgcctttagatgctcttctgcggcattaggcgaacggaaccccagacgctgcgcgatctcggcacgtgtcggtggcatgcccgtttgcgagatgtgatcgcgaaccaagtcgtagacctgttgctgtctggtagtaagtgctttcattccgccccctgtttgtttatacagtttagctgtgagtatatacagccaaacccctattgggaaccgaagagtgaataaaaacagggattaatggctgtattgttcttcaccactatttgctctttccctgaactatgccaaattcaagtattgccacagcacagtagcccaaataaataccgccagcaggatagtgatgagcactgcggcggaccccatatcctttgcccgacctgaaaggtcatgcagctcgctgccaatccggtcaacaaccgcttcaatcgcactgttgataatttcaaccaccaccaccaagacgacagatccgatcaataaaattcgctctatgactcccacatcaagccagaaggccagtatgatagcgatgacggccaccacggcctcctgccggaaagcggcttcatttttccaagcagcggttaaccctttcacagaataacctgccgctttatagatacgggttagtcctgttgattgattagccatgagttatgtacctttttattggattgataatagtttcgctgcttccatcagtctgatcaccacagatctcaaaacgagtttctggtatccttgcggcgaattgctaacaagaggcttcacgttgttatgtcaggttggcgtaaaatatattataagttactgaatttaccacttaaattgttggtaaaaagcaaggtaatccccgcagatcctgtgactgaactggggttagacccgtcacgtccaattttgtatgttttaccttataactctaaggctgatttgctgacattgcgagcgcagtgcctggcacaagatcttcccgatccgttgattccactggaaatagacggtgcacagctgccaagtcacgttttcatcgataatggcccacgggtatttcgctattatgccccgaagcaggaatcggtaaaattattccacgattatctggatctgcatcgcaataatcctgagctggatattcagatgctaccggtatcagtaatgtttggccgctctccgggccgggaaggtcacggtacaccacatctgcgcgtactgaacggcgtacaaaaattctttgccgtactgtggctgggtcgcgatagctttgtgcgattctcgactaccgtttccctgcgccgcatggccagtgagcacggcactgacaaaaccatcgcccataagctggccagagtcgcgcgtatgcacttctctcgtcagcgtttagctgccgttggcccaagtctgccggcacgtcaggagctatttaaaaagctgctggcgtcaaaagctatcgaaaaagcggtggctgatgaagcgcgtaccaagaaaatttcccacgaaaaagcgcagcaaaatgccatcaatttgatggaagagattgcggcaaacttctcttatgaagccgtgcgtttatccgatcgcgtgttgagttggacctggaaccgtctgtatcagggcatcaatgttcataacgccgagcgcgtgcgccaattggcacaagatggccacgaaatcgtgtatgtcccctgccatcgtagccacatggactatctgttgctgtcctacgtgctttatcatcaaggcctggtaccgccgcatattgctgccggtatcaacctgaacttctggccggctggcccgattttccgtcgtttaggtgccttctttattcgccgtacctttaagggcaacaagctgtattccaccgtgttccgtgaatacctaggtgagctattcacccgtggttattccgttgaatactttgtggaaggtggccgttcacgcaccggtcggctgctggaacccaaaactggcaccctgtcgatgacaatacaggccatgctacgcggcggctcccgccctattactctggtgccaatttacatcggttacgagcacgtaatggaagttgggacatacgccaaagaactgcgcggcgcgaccaaagagaaagaaagcctgatgcaaatgctgcgcggtctgcgcaaacttcgcaatttgggtcagggctatgtgaactttggcgaacctttgccattgactacttatctcaacaacaacgtgccagactggcgtgatgctatcgatccaatcgaagctcagcgcccaagttggctgactccggcggttaacgatttagccgctaaaattatggttcgtatcaataatgccgcagcggctaacgcaatgaacttatgttctaccgcgctgctggcatcgcgtcagcgttcattgactcgcgagcaactgttggagcaactcgattgctacctgcaactgctacgcaatgtgccttacgccaaagatgtgaccgtaccggataaaacgccggaagagttgctgaaccacgcgttgaaaatgaataagttcgaggtagagaaagacaacatcggtgacatcataatcctgccacgtgagcaggcggtgttaatgacttactaccgtaataatattcagcacttgctgatgctgccttcactgattgctagcatggtgatgtaccatcgccgtattactcgttccgagttattacgcaagatcggtatgatttacccaatgctgaaagccgagcttttcctgcattataccaaggaagaacttgcgccaacgctggatacgctggttaacgaactggcgcgccaacagttgatttgcgataaaggcgatgaattagtgttgaatccagcgcgtattcgtccgttgcagctgctggccgctggcgtgcgtgaaactctgcaacgctacgcaattacgctctctttgctcagcgcaaacccaagcatcaatcggggcgcgctggagaaagagagtcgcatcatggcgcagcgtctttccgtactgcatggtattaacgcgccggaattctttgataaggccgtattctccacgctggttgcaactctgcgcgaagaaggctatatcaacgatattggcgatgcggtgcaggaacatacgctggaagtttacaatatgctaagcaacctgatgacgccggaagtgaagctgacgattgaaagcgtcagtatgcctgccgagacaaatcagttacctgctccagataaaccagcagaataatttccagatagctgaataagcaaagggccagataatatctggccctttctatttgtatcatttggggtttaattcaatgaccaatagctcaacagaatcccaaggaacagaaccaaaccaacgtaattattattcaggaaagcctggaaacaaggttcacgctgacgtttagcaatcattttctgctgatgaataaatagagcgccggctaataaaacggaccaatagaacgccccgcctaaatgcatcagataaccgataatcaccatcaataacaacgtagccagttgcagcaacccgacgatgaggcggtcatactgaccgaatagaatagccgtggatttgacgccaatttttaggtcatcgtccctatctaccatcgcatacagcgtgtcataagcgacggtccagcaaatattcgccaacagcaacaaccaacataccagcggcaggctttcgcttactgcggcaaaacccattggaatcgaccagccaaatgccgtgcctaacaccacctgcggcaagttggttacccgcttcataaagggataaatccaggccagtgccagccccaccagagatagccagatggtcatactgtttaaggtcagaaccagcccgaacgagatcagcaccagtacgccaaacaggattttgctttctttttcgctcacagcgccactgggcaatggccgtgaagcggtgcgttttacgtgtccatcgattttacgatcggcgaaatcattcaccacacagcctgcggcacgcatcataaacacgcccagcacgaacacgatcagaatttttgcatcaggaataccgcgtcctgccagccataacgcccataatgttggccacagtaacagcagtgaaccaataggcttatcaattcgcatcaaacggcaataggcgcgccatttgctttgaagaacacttccatccaatttatttatctcccaaatctttgctcatagtcacaccctggaaagctgatataacggcgacgctggcaagaatacttccgtcagtaacaggggtttcccagacaggcgtaaaagtgaacggcgcgcccaaagcttttcctgtaaccccgtttggatatagtctcgcgtcagagcatcgccactgaacagatagcgccctagaggcaccgttcccagatccaccagcgcacgatcggagccagaaagggtttcttctggcaccaccgtccgccccaataaccaaggctgagcatcaccgaacaaaataacttctctcagccaataacgctggcttatcggcaaatgttccgcctcttcacccagttcatcgcgagtaataaaacattccagctttggttcgatatgtacccgttggcaatgttgctcaaaacggcgggtcattgaccccagctccatcaaccaatcggcaatatcggcactgagattaggctgatcaatagatcgccattgaataggttttagaattgatacctcgccgtatgacattcggctcgctcccgccggggatacatctggctccccgcaattggtcaacatggggctattgtagcgcagaaagcccttggggtaacacgtcgagtagcatctgatgatcataacgacaacagtgagttaactgcgtcacatttgcagaatgcattaggtaaattgatctaattaagagaaataaggtttagaaagggaagaacgcgataaccatcataaatcatcgccaaagatgtcgcagataaaatcagtcggggtatacattcgtacgtaaaccaaaatccacacgcgcagtagccgccatagatcacaaagaaaaaaggtgcgccacggcgcaccaatcatccagccacattcggcagcgctgggtatctagcccttgcctttgacgctgccaataaaggtttgacgcgcggaggttgagcctagtttttccgcttcattcagcagtttcagcgctttatccacatcgcccgcttttaccgcatctttgatcgcctgattgaaatagctttcggtatcgttaagcattggctcggtcggtttactcaccgtagccggtgcggctgccactacgggctgagtatttccgaccacgacaggagcgggcgcggctggctgagtgaaaccaatcataatgttgcccatgctttgttccgcagtggctttgattttcagcacaccagtcggagcatggctggcgataggatcgggaatatttggtactgcgttacctacgccttgggcataggctttggccggatcgagcagttgagtcgtttttgccagatcctgtttggtggtgtacaccagcaggtagatttgtttttggcctaatgctggagtcagtttcagtacgccttcaagacgatcgaaactcatgatgccggctttttcgtaggtaaaatagctggctggatagtaggccgccgggcgcatttgttcgtccagcaccacgacgcttggagagtagagtttattatccaccacctgactactcagcgtgacttccatcgaaccgcgatcggctggcaacgcgaaagcggctaccgcaccttcaatttcaccctgagaaatatgcgggctggcgttggtcagtttgatttcctgcgacgccggtggaactaacggttgccacggcaagctttgtaaagtcgatggactaatgctcggtgcaaccgaaacattggccggagaaatagtagaagcggcctgcactgccagcggcgcagtcaaacccaaggccagagacaaacagagtgacagcagattctttttcattgttataccctcatagattgagcgtcagcgctaactccgcacgggcaaggtcggcaaagttaaccaatccataaccctttatgtttcaatcggctttaaggtggcgatttgaaatttatcgggttatcacttgatcttgctttaaaaaatcaaacagccgccccgaaggacggctgcgtcactgctgttaccaccaggcttcgaattgtgcgccgaaggttacttcgttgtttttaccacggctatcggtgccgatagtgccgttctgcgccagcccgaggtcaggactgcccttaacgttatcgtagccccatttctcatcccagtttgcataggttgcaaacacgcggatggccggacgagaccagatgctatcccccgcctgccattgttgagccagagtcagtttgtactggccgttacggtcgccggtacgctgagatttcacgttgtcgtagcctgcttccagtaaggtgctcatgatcggcgtccatttatacattgggcgcacgcccacactgtaccaagtggtgccgtttttgttatcccaatcggtatcctggtataaagcgacgtacatcatgtcccatttttcagccagattaatggcaccgtggtcaataatacgcagcatactgccgttgttattcaccagagagccctgtgaatggccgctgttccatgaggtcatcgaatcggtggcgtactgaaccacaaatttgttaaagccgccgaacatgctttgagtatgttccgccgtcagcaagacgccgtctttggtcgcatcttgtgccaatgcataaccgtcctgagtattagcgcgaccgtagtccacaccgaactcaagcgtaccgcctgggttggtttccaatccggctaaacgcacgtcaaacacgtcattaatggttttatctgcatctttacgctgattatcgatccaggcgctggagccaccggcttcagagttacgggttgcggccaaagacagcttgccgaagcccagatcgatgttttccaaacctgcacctgggccggagatatcccagtagtagaagtcgatcatgtgaacgtcatgacgttgatagaagcgtttacctgcccacatggtggaacccggcaaccattcgatcagattcttaccctgcacgttggcttcacggaaagcgggatccgttgattcccaatcgtcacgctgtgatacggaataggctacgttggtatcgaagtagaagcttttatccccttctttccacagttcctggcctaatttgatttccgcataggtttcacattcgttgcccaaacggtatttagtttgagcgccggtggttttgaaacattgttgctcaccgccgctccctgtccaaccgataccagaacgtgcataaccgtggaaatctacggccatcgcttgtgttgacagaacaccagcggcaacagccagtgctatcggtaacttgcgcagagtagtcatcagaaatctcctgtttaatttgcctaacggcgtgcgtgctttacattcactgtcagtagacgcccggctcttgatgcagccgttgacacgcagagccatcttcacggaacagatgacagcgatatggcggcagcccgatggcgaatgttgcaccttcttctaccagcaccacgtcgttctggcggtaaaccaggttctgacgtattgcggggatttggatatgaatctgtgtttcattgcccagttgctctactacctgaatcgggccttccagcgtgacttccgattcgctgcttggcagcagatgctccggtcgaatacccagcgacatattggcgccgacctgtacgcgatcgccttccaccggtagccagaccaactggcggttcggtagctcgatttgtacctgacgaggctcaacggcggtcactttcactgggaggaaattcatttttggcgaaccgataaaaccggcgacaaagcggttggccgggtagtgatatagctccagcggtttacccacctgcgccacgttaccggcatccaacaccacgattttgtctgccagcgtcatggcttcgacctgatcgtgcgtaacgtaaatcatggtgcgttgcaggcgcttgtgaagtcgggaaatctcaatgcgcatctgcacccgcagcgcggcgtccaggttggataagggttcgtccagcaggaacacatccggttcagccaccagcgtacgaccaatagcgactcgctgacgttgcccgccggacaaggcttttggccgacgatccaataggtgcgccagttgcagcacttcagcgacctgattaactcgctggttaatttcagtttttttggcaccggccagcttcaggccgaaagacatgttttccgccaccgacagatggggatagagcgcataagactggaataccatgccgatgccgcgttctgcgggcggcacttcgttcatccgtttaccgccgatcaacaactcgccagcggtaatatcctcaagaccggctatcatgcgcagcagcgttgatttcccgcagcctgacggaccgacaaacaccacaaattcaccatcttcgatctccagattgacgtctttggagatcacgacctcaccaaaggccttataaacgccgcttagcgttacgttagccatgcgttactcctttgcttgcgcaaacaactttttcatgtgaatccgattgaagaaaaatggcggaagcaaaacccggcataacccagcgatgactcccagcactctgatgactttctctctgcgcgccgtgccgccatgccactggcaaggttgcctcggacggcgtcgccgtctgagtataaggctgcaaattgatcagcgcttcaacacattgatcttgctgggtaataaataatctgattacgccgttctgctggctgatttcagccagttgcccttgttgaatcaccggctgacggcgtagagccaacaacgtttggcaaaagcgcagggtggaatcaggatcctgctgctggcggctgatggccatagcgcgatgttcaatagccacacgctgataccaatgaatctctccggacgtagcctgctctggcgcttcgtgccacggcatcggcgtctgcgcaccttgtggttcctgtagcgaagcggcgtgaggcaagcccagctcttccccttggtacagcgctataggcgcgggcaatagcgccagcaaggtcagaaaagcgtctgcggagcgaagatcgccctgcccccagttgctcactacccgtggccgctcggcgtcgccggtgctccacacggactgagaaagcgtggcccgacgctcggctaataccgacaccagtttttccgaactgaacggcaccacctgctgagccaaggcaccttgcaatagcggttgctgtaacgcctcggagcctgcgttgctctgtgggttaatccacaccgccaggccttgttcggctaaccgccgagccgtctgctcgcagggttgcatatcctgtggcacaaccagcccatcaatcgataaggcgttcagataagtcagtgctctcaacaggccgcgataatcccccatgccgtcgccgtttccgtcacggaaactgatcgggtgaacccgatacaacgtaggatgaggaacggcacgcgctggcaacatagtcctggccctgcaaactgtggttaaaattgatgctgctgatactgcgggaatgccgcaatttggtaatcatccgtaacaaagtttttcatgggggaggagatgggaggatgagagaggtaagggggtaagcgaaagttcccaccgaaagacaaattcgtgatcctgcttacaaatttcgaccggtatttttgtggctaaccccacagaataggcagcagtgttaactgggtcacaataaccttgtcgggggcgtagacggggggaggatgagactgtgtccggttgtgacccaatatgacagcgtactaaattgcagcgcacccacattatgacgctgtcgctgccacctcgcactgtgactcacagctacccgataagcggctattgattcacacgaaagtcggtgcccacaaaattggataaaaggattggattatgactcacagtttcatgaagtccggcgttggtaagaccgctcgagtcctggcgctttccgcgctgaccacgctggtactttcctcttccgcttttgccaagattgaagaaggtaagctggttatctggatcaatggcgataaaggctataacggtctggcagaagtgggtaaaaaattcgagaaagataccggtattaaagtcaccatcgaacatcccgataaactggaagagaaattcccgcaggttgcggccaccggcgacggccctgacattatcttctgggctcacgaccgtttcggcggctacgcgcaatccggcctgctggccgaagtccatccatccaaagccttccaggacaaactgttcccattcacctgggacgcggtgcgtttcaacggtaagctgatcgcctacccaatcgcggtggaagcgctatcgctgatttataacaaagacattattaaagacgcgccaaaaacctgggaagaaatcccagcgctggataaagaactgcgggccaaaggcaaaagcgccatcatgtggaacctgcaagaaccctacttcacttggccggttattgccgctgacggcggttatgccttcaagtttgaaaacggcatctataacgtgaaagacgtcggtgttaacaatgccggagccaaagctggcctgcaattcatcgtcgatttggtgaaaaacaagcatatcaatgccgatactgactattccatcgctgaagccgcctttaacaaaggccaaaccgcgatgaccatcaacggcccgtgggcgtggtcaaatatcgacaagagtaaaatcaactacggcgtcacgctattgccgactttccacggccagccgtctaaacctttcgtcggagtattaagtgccggtatcaacgccgccagcccgaataaagagttagccactgaattcctggaaaactacctgttgaccgaccaaggcctggctgaagtaaataaagacaagccgctgggcgccgtggcgctgaaatccttccaagagcagttggcgaaagatccgaagattgccgccaccatggataacgccaccaaaggcgaaatcatgccgaatatcccgcagatgagcgcattctggtacgccacgcgcagcgcggtattgaacgcaatcaatggtcgacaaactgtagaagccgcattgaacgatgccgcgactcgtattaccaagtaacggctctgctcgttaaaggggcacggattccgtgccctgataaattcttcacgtcagatcgcagtgctgtagtcgctacagaatggccaaatagtcacaaaagggacccgttatgcagttatcccaaaccgaaagttatggacgcaaaaagaaagtcgcctggtggcagagtgatgcgctgaagtggctggctattggccttatcagcctgtttacctgctatctgatcatattaatgtatgcgcaaggtgaatatctttttgccatagtgacgctgattctggttagccttgggctgtacgtgtttgccaaccgtcgcgcctatgcctggcgctatgtttaccccggcgtggccggtatggggctattcgtcctgttcccgctgatttgtaccatcgccatcgcctttaccaactacagcagcaccaaccagttaacctttgagcgggcgcaatccgtattgatggatcgtcagttccagaccggaaaaacctacggcttcggcctctatcctgcgggcaatcaatggcgtttacagctcaccacgccggatagcgatcaacttttgatatctgagcctttcagcctcgatgggctgagcgagcagcgagttaacgtcgctccggccaacactgaagcacagggtgaacgcgcctctttgcgagtgattactcaaaaccgtcaggcgctaaaccaattggtcgcggtattgcctgatggcggcgaactgcgcatgagttcactgcgccaatttgccggaaccagcccgctgtatgcgcttggtgcagacggcagggagctgattaataagcaaacaggcgttatttatcggcccaatattgcagaaggcttttatcaggccgtcaacgccgatggacagtgggaaaatgaaaaactcagccccggctttaccgtcactattggctggaaaaacttcctgcgcgtgctgcacgatgaaggcatccaaaaaccgtttatctcaatctttgtctggaccattattttctcggttctgagcgtgacctttactgtcgccgtgggcatggtgctggcgtgcgcagtacaatgggacgcattgaaaggcaaagctatttaccgagtgatgctgattctgccctatgcggtgccgtcctttatctccattttgattttcaaagggttattcaaccaaagcttcggtgaaattaacctgatgctgagccacctgtttggtatcaaaccggcgtggtttaacgatcctctgaccgccaagagcatgattttaatcgtcaatacctggctgggttatccctacatgatgattctgtgcatgggattattgaaagccatccctgacgatttatacgaggcttccgcaatggacggtgccgggccgtggcagaacttcaccaaaatcaccttcccgctgctgatcaaaccgctcacgccgctgatgatcgccagttttgcctttaactttaacaatttcgtattgattcagttattgactaacggcggcccggatatgatcggcaccacaacgccggcagggtacaccgacttgctggtcaactacacctaccgaatcgcttttgaaggcggcggcgggcaggacttcggcctcgcggcggcaattgccaccctgattttcatattggtaggcgcgttagcgatactgaatctgaaagccagcaaaatgaattttgattaaggaggagaggcagatggccatggttcaacctaaatcccagcgtttgcgtctattgggtacccattttctgatgctctgctttatcgcgctgattatgttcccgttattgatggttattgccatttcactgcgacccggcaactttgctaccggtagcctgattccagaccagatttcctgggagcactggaagctggcattggggatgagcgtgactcacgccgatggcagcgtgacgccgccgccgttccccgtgatgctgtggttgtggaactcgattaagatcgcggtgattaccgccgccggtattgtcaccctttccaccacctgcgcctatgcctttgcgcgtatgcgtttcaaaggaaaaagtagcctattgaaaggaatgctgatttttcagatgttccctgcagtgttgtcactggtagcgctgtatgcgttgtttgaccgactcggccaatatttaccgtttattgggctgaatacccacggcggcgtgattttcgcctacatgggcggtatcgcgctgcacgtttggaccattaaaggctattttgaaactatcgataactcgctggaagaagcagccgcgctggatggtgcgacgccctggcaagcattccgattggtgctgttgccgctgtcggtaccgattctggcggtggtgtttatcctgtcgtttattgccgccattaccgaagtaccggtggcctctctattgctgcgagatgtgaacagttacacgctggcggtcggtatgcagcaatacctcaatccacaaaactacttgtggggtgacttcgccgcggcggcagtcctgtcggccattccaattaccgcggtgttcctactggcacagcgctggctggtgggcggattaaccgctggcggggtgaaaggttagtcagaatcgttttgctggtacaggtgtctgtgtcgggtgactgcaccagttggttacaaagcatgccactgcttactttgctgtaatttaccctggtactgtgtctttatggcggcctatatggccgccattttttatgcctattattgtttactcgcgttttagtcgctcggtattggccagatataacgtcaccaccagcagcagaatcgacgccgaatacaccagcgtatcaatagggttctcgtgatcgacaataatcagccggataatggcagttattccgatatagataaaatagcgtagagggaagtgataacctgactcaaagtacttcactatcaatgcgataaactcgaagtacaggaagtagatcactattccttcgatcaacttataggatgaggtttcctgattattggtaaacaaaacctgcccaagatgaaacgtctctttaatcagaaagaccaccaaaatagcggccaacgcgatcaagccaacgtttaataaacgctgtagatttttagctacccattgagaacgcgaatttttcgccatagatacacccagagaaagagggggaaacagtctgaggctaacacaaggccaagcctcagaccgaaaaaaggccccttacatcagtaagaggccaataataagcacggatcaaagagctttagctctctagcttaacgccagttcttgaaacggttaatcaacgcattggttgagctatcgtggctggtcaccggcgcatcatccgccagctcaggcagaatgcggttagccagctgtttgcccagttctacaccccattggtcgaaggtgaagatattcaggattgcgccttgagtaaagattttgtgctcgtacagagcaatcaacatccccaggctgaacggagtaatctcgcgcagcaagatggagttggttggacggttgccttcaaagactttgaacggtgcaacgtgcgccacttgctccggcgttttacctgcggcggcaaattcggcttccacttctgcccgcgatttaccgaaagccaaagcttcggtttgcgcgaagaaattagacagcaacttagcgtgatggtcgctcagcggattatggctgatagctggcgcgatgaaatcgcaaggaaccaatttagtgccctgatgaatcaactggtagaacgcatgctgaccgttggtgcccggctcgccccagatgattgggcccgtttggtaatcaaccggattgccattacgatccacatacttaccgttagattccatgttgccctgctggaagtaagccgggaaacgatgcatatactggtcatacggcagaatcgcttcggtttctgcgccgaagaaattgttgtaccagatgccgatcagtgccaatagaaccggaaggtttttctctgctggagtttcggcaaaatgacggtccatagcatgggcaccgctcagcaactgctcgaaattctcgaatccaacggacagagcaatagacaggccgatagcagaccatagtgaataacggccgcctacccagtcccagaactcaaacatattgtcggtatcaataccaaactcggctacggctttaccattagtagacagcgcagcaaagtgttttgccacatgcgcttcgtcctgtgcagcagccaggaaccagtcgcgagcgctgtgcgcattggtcatggtttcctgagtggtgaaggttttagatgcgaccaggaacagcgtggtttccgggttcagcggtttcaacgcttcggccatatgggtgccgtcaacgttggaaacaaaatgcatattcagatgatttttgtacggccgtagcgcttcggtcaccatgtaagggccaaggtctgagccaccgataccgatgttcactacgtcggtaatcgctttaccggtgtaacctttccattcgccgccgatcacgcggtcacagaactgtttcattttagccagcaccgcgttcacttctggcattacgtctttaccatcgaccagaatcggggtgttgctgcggttacgcagggcaacgtgcagtacggcgcgatcttcggtacggttaattttttcaccggagaacatggagttaatcgcaccggccagatcggtttcttttgccagtgcctggagtttttccatagtttcagtggtgatgcggttttttgaaaaatctaccagcatctggtcgtcaaaagtggcagaaaatttctcaaaacgctgcttgtcctcggcaaacagatcgcggatttgcacatctttcatctgttcaaagtgttgttctaacgctttccaggcagcggtttgactaggatttacatttttcatagcgacgctcttctaggcttaaggataatgaaacgaatgcgttaattgtatcctgttaacctgtgattgagatctcttttcttgcgataggtaataactctcgatcagaaaagatccccattccctttttaagggcaaaattcctatacttcaggataacaacctgttactgaggttgtgtaactgtcacaggtatgtggcagattaaaacatacccacttttgcttaagattaaaaaggttgtcgctatggaattatctcccccgctaatgttggtggtgattggtctgagttcattattggcgcagtgggtcgcctggttattacgcttaccggcgattcttccgctgttattgatgggtattgtacttggcccgctggtgcactgggtgcagcccgatttgctgtttggcgatttgctgttcccgcttgtttccctgtccgttgccatcattttatttgaaggcgcgttaactctgcgagtggaagagattcgcggtttgggcggcgtggtacgcaatctggttaccgtgggaatgttggtgacattttcggttatcagcgtggcctgttggtggctactgaatttccctccagaattggccgcgctaatcggagccgtcacagtggtgaccggcccgacggttattgctccgttaatgcgagtggtgcgcccaaaatctacgattaatcaggtgctacgctgggaagggattgtcatcgatccggttggggcgatattcactctgctggtttttgaatttattgtcctgaaacagaatgcagaatcttacactcacctgttctggacgctgggtattaccgccgcggtgggtttgatcgccggcgcgctatttggctatttattaggattggcgctgcgccgcgtctggctacctcgctatttgcaaaacctggcggtactggcaattatgttggccgcgtttggtatttctaacgccattgccgatgagtccggcctgcttaccgtcacggtaatgggcatctggctggcaaatatgcgcgatgtcgataccagcgatattctggctttcaaggaagaattatctgcgattctgatttccgctctgtttattattctggcggcgcggttggatattcatgctctatggaacatgggttggccgctactgattttactggcggtagtgcagtttattgcccgtccgctgtgtatcgccgtttcgacctggcgatccagtctccattggcgcgatcgtctgctgttgtgctggatcgctccgcgaggtattgtcgcggcggcggtcagctcattatttgccctaactttacagcgtaatggctacgaaggagcggataagctggttacggtggtttttgcgattattatcggcaccgtcgtgctgcaaagcctgaccagcggaatgatggcgcgctggctgagggttcagcagcagaagccgcgcggcgtactgattgtcggggccaatagcgtggcgcgcatgctggcgcaggcgttgcttaaactgaatattccagtgctggtcacggatagcagttgggaatattaccgcctggcgcgtatggaaggcattccggcctattatggtcacgcttactcagaacatgctgaaaactatctcgatctgagcgaaaccgcgcaggttttggcgctatctcccaatcgccaccagaatgcgctagcggtgtaccattttggccatatctttggcgatagccatgtgttcgccattcgttccggcacgctacaaaaagggcgaaccaatgcggaaagtagccgattccgccgccacgaagtgctgttcgcgccagaagccacttatggccgcttaagcagccagattgccaaaggtgccaccatcaaagcgaccaaactcagtgaaaactttggctggctggaatatctggagaaacatcagggcattattccactattttatcagcgggaagacggcactttgcagccaattagtgccggcgtggctcccgctgtgccctgcactttgatagccttggtacaggacgataattcatcggcaagccgctgattacccaagaaatcacttcaaccagagggaaggccaggcgtcttccctttttattataaaattgacgaataagcgctcggtcagaaaaaatttttattgttaacaattggtgacatcgttggaaaaaccgctattttgcagataatcccaatacattgccctcgccacgccacagattcccccactaggctgaaaaccggcagtatgaaggtgaaaaaacctcattgtgccgccgttgacagcggcccgagaacccgttattcctaaacacctacttacgcagcattgcgtaagccagaagaggtgcgtcgcccaggtagagtgtcggaggagccgtaatccgctgaagacatttgagggggagcgacgccgagacgtgatgacttcggctatcaccacgtcgactacaggggctgaatcccctgggttgtcaccggaaaccgttcatttagaatggttagcaaggtggagcgcttctgggtgtaccctagcgtaactcttatgcttgtgccccctgtctcccgctcttcccttgtgccaaggcttatgtatttagatgaccaccctgcgcggtgcatccctgacacgaggttttttagatgattcatgcagcatcccaacaggctaccgtcgtcgccaaatttggtggaaccagcgtcgccgattttaccgccatgagccgcagcgctgacgtggttctgtctcatcccgatgttcgcctggtcgttctctcggcctccgccggtgttactaatctgttggtcgcccttgccgaaggttgcgagccagaacagcgcgcctttcatctggatgaaattcgccatattcaatatgccattctcgataacctgaaagaatccagcgtagtacgtgatgaaattgaccgtatgctggacaatatcgccatgttgtccgaggccgccagcctggcgacatccacggcgctgacggacgaattggttagccacggcgaactgatgtctacgctgctgttcgttgaaatcattcgccaacgcgacgttgccgtggaatggttcgacgtgcgtaaagtgatgcgcaccaatgatcgctttggtcgagcagaacccgatactcaggcattggccgaactggctcgagcccagctggcgccgcgtctggccgaagctattattgtcacccaaggctttatcggcagcgaagctaaaggccgcaccaccactcttggccggggcggcagtgactataccgccgcattgctaggtgaagctttgagcctcagccgcgttgatatctggactgacgttccaggcatttacactacggatccgcgcgtggtgcctcaagctcagcgcatcgataaaatcgcttttgaagaagccgctgaaatggcaacttttggcgctaaagtcttgcatcccgccaccttattgcccgccgttcgcagcgatattcccgtgtttgttggttcgagcaaagatccggccgccggtggcaccttagtctgcaataaaaccgaaaatccgccgctgttccgcgcgctggcattacgtcgtaaacaaacgctggtgaccctacacagcctgaatatgcttcacgctcgcggttttctggcggaggttttcaatattctggcgcgccataatatttccgttgatttgatcacgacctcggaggtcagcgtggcgctaacgctggataccactggctccacgtcaaccggcgaaagtctgctgaccacgtctttactgaccgagctatcctccctctgtcgggtggaagtcgaggaaaatctggctctggtggcgattatcggcaatcagctttctcaggcttacggcgttgggaaagaagtatttggcgtattagatccattcaatattcgtatgatttgctacggtgccagcagcaacaatctgtgcttcctggttcctggcgacgatgccgaacaagtagtcaaaaccctgcaccataatctgttcgaatagataataacaatcagccgggtggataccgcccggcaccttctctgcacaacatcaccagataacaggacatcgcatgcttgccaaagtcactcgcttgttcccgctctggccggttttactgtctatcgctgcctattacactcccagcacctttacgccgatcggcccctatatcgggccatgacttatgctaatcatgtttgccatgggcgtaacgctgcggttagaagacttcaaacaagtgctttcgcggcctgccccggtggctgcggcaacttttttgcattatctgattatgccgctggcagcctagatactggcaatgctattccgcatgccgccggatctttccgctggaatggttttggtaggttagcggaacagcatctaacgttatgatttatctggccaaaggtgatgtggctttatctgtcactatctctgcggtttcaacgttggttggcgtattcgctacgccgctgctcacccgtttatacgtcgatgccacaatcagcgtagacgtaatgggtatgctgaaaagcatcctgcaaatcgtagtcattccgataactgccggattggttatccatcactgttttaccaagacagttaaacgtatcgaaccctacctgcccgctctctcgatggtatgcattctgaccatcatcagcgctgtagttgcgggtagtcagggacatattgcatctgttggattcgtggtgattatggccgttattctgcataacggtatcggcttgctcagtggctattggggcgaaaaactattcggctttgacgaatcaacctgccgcacattagctattgaagttggtatgcaaaactctgggctagcggccacattaggcaaaatctacttctctccattagctgcgtttccgggggctcttttctccgtctggcacactctttccggttatctcctcgccggttattggtcaggacgagcaatcaaaaaagcagcatcaaatgataaattaactaaataaagttgtcgtacccgataaatttcaggtgcgttctcgatctaaatacaaagacttacgcgcgtttaccttaaatgtcctctacgaaatttcacattcccatctgcacgggttgtcagctattaccatttcccctattatccaccccatagaaatgagttaggattcttctgactacaaagaataagattaatagtaaaaacaaaattaatctttataagaaaaaataatacttacttttcaatttttataaattttacaaacaccatggaattaacccttctaaaaagagtcattccatttagtcattctacgcatttaataagtcattaattatctgcgccaacatcgcagataaaggctacctgaaaaaggtgaactgacgcttcaagccatttgaggcttctctgttatttgctatttaaccttttcgagcaagaggtagtcttgccccgacgcattaaataaaggacagaaacagtaccaacgtctttatatggcgtgacagactgtctctcataataggattaaatgattaaaagatactccgcatttttattgcttttgagcgccagcgctcaggggaatactttgcctaatatgggtgacttctcccctatgagcgaatctcgtcgtgcattgcaggatagctcgcgtaccgttcacgaaataatggatgaacgtcgctaccaacagttaaagaaacaaaacctgttggattccgaagctgaaatgcatcacatggctttacctatgtcggcgcaatgtttaccgatcaatggcgtttatttacgcggcgtcactctattaaaaaacagtgacttagaatcgatcgctactttacctgaaaattgcatcagtagtaacgatattaatcaacttacccgtgaaatcacgcacttatatataagcaaaggttacgttactgccagagttcaatttatccagcctaatcaggatggtgaactgggtattaatgtcaccgaaggttttatcgagaaaattatcggtggtgaccactgggttaatagtgatttattatttcctgatttagtcggaaaaccgcttaatctgacacagcttgatcaaggattagatcaggcgaacaggctgcaatccaatacaactaaattagatattttacccggtaaaaaagacggtggttctattgttcgattgaacaatgtacataccaaatcatggcttttatctggaagtatggataattacggccagaaaaataccggaaaatggctggctcggacttctgccagttatgatagcccattgggtttatctgacttcgttagcttaaatgtcagtagcacattaaaagatccgcagcagcgctatagccgtgcctacaccatgctgtattccataccttacggtgcctggacatttagcggatttgccagtttctctgattatttaaatcatcagaaactagcgattaataccgttaaattagacggaaatacaaaacaatacggcctgcgtacggattatgtgtttcaccgggatcaagaccaaattgactcactgagcgcacaacttacctacaaaaacgttaataactattttgagtcatccaagctacatatcagcagcccaacgctgacggtgctggaattgggtgccagtcatatgcaaattctaccgcgcggcctgcttagcctgaatgccacggtagagcaaggcatgccgtggtttggctcagagcggagtagtggccgcaaacctgccggttatccggacgcacagtttaccaaagccaaggttttcgccagtttaagccagcgctttaccctgtttgataacccgtaccaattgactaactcgttctacggccagcacagcaaaaactctctaccgggcgtggaatggatcagcctgactgaccgcagcgcagtacgcggctttagtcatagcaccctttccggcgataacggttggtatctgcaaaatacgctgtctcgcacagttccagtgggcaataccacttttactccacgtttaggggcagatgtagggcgagtacaggcacgtcttagtcagcaaagctggcaaagcagcgcaggcctcagcgccggagtgaccttccgttatcaacggtcattaattgatgtggaagccagccgtggctggattctttccgagcataaaacccccgttgatccggtacaggttctggcccgtttctcgtacaccttttaacgatccttttattgattaataacaccagtagttaacgttataaaaacggaaatatctaggagatacacggatgaaaactaaaaaattcaaactgtcacccgcaggaaaactggttgcctctttggcgattattttcgcctcattgggtgcagcctacgccgccgatatcgtcggggccggtgacgcagcccataacccaaccatcagcagcgctgccaacggcgctgcggtagtcgacattgttgctccttcagcatcaggtttgtctcataaccaatacgatagctttaacgtcaataaacccggcgcagtgctaaataactccttaaccgacggcacctctcaactggccggtcagcttaatgccaacgccaatctgggcagtaacgctgcaaaaatcattctgaatgaagtgattagccgtaatccttctttactattagggaaacaggaaatcttcggcatggccgctgattatgtgcttgctaacccgaacggtatcacctgtgatggctgcggttttatcaataccaaccgctcttcgttggtggtagggaatccgctggttgaaaaaggggagctgaatggctttaacaccttcaacaatacccatgcgctctcaataggcaaaggcggactggatgcggatagcgctctggatctgattgcaccacgcatcagcgccgaaggccatatttcctcaccggagcaggtttatgctctgaccggcgaaaaccgtgtctcagccaaaggcgagattctggaaagcagaaacactcaaaaagcgggcgcattagacagctactaccttggtagtatgcaagctggccgtattcgcctgatcagcacagccgaaggaagcggtgtcaaaatcggcaatgaaatcgatacctttcgtttagctaacggtcaggtcaccgttggggatatcgatgttgcatcgaaaggcaatctcgagttagaggcagccaaattaaaaggcgccgatatcagattaacgggtaaaaacatcgtatccaaaggcaaaatcatctccgatagtcacagccgtaatgatagcgataactacgatacctggtggagcggcaaatacgttaacaaccgcgatagcagccagcgccttcaggaaaccagcatttcaggtaatgatatttcgattgttgccaagcaaaacaatacgctgaccggcgcatatgtccaaggccgcgatgtcactctgcaaggcgctaaccttaagctagatgggcaaaaactcacacaaaccgacggccatactgataatcgggatcgtggtgcctggcgtcgcaataccaataaagaaaacgagaaagttgaacaagttggcactgagattcatgcacatcgaaatgcaaaattaatggctgacgaaggcgatatcgtgatcagcggtagccaggtctatgccaacaacgatctcagcatcaatgcaaaaaacgatctgcatctatcgggtttaactgaatcacaaaccgtccgcgaaaatggcaaacgtaaaaatgacaccagcaaattactgacgggtagctggtccaatagcactacgacggaaaatcttaaaaccgcaaaactcaacgccgtaaccggtaatttaggcctctccgcgggcggtaatatcaccagtaaaggcgcggaagttcgagctaaaaaagacctgattgtcaccgcagacaaacaaatcaatatcgatgtacagaaaacagccaaccagaaaaccgtgaagaacgatatcgtggtttggggcggtatcggcggcggagatgataaggataatggcaataagaaagaagtcagccatgcctctgatttttctagcaatgggaaacttctggtatccggtaatcaaggcgttaaggttactggtagtaaagtcaccgccaaagaaggcgcattcgttgaaaccaagaatggcggtctggtcattgataacgccattagcttaaccaccgagaaagtggatcaacgcaccggtaccgttttcaatatcactaaagattcgaagaaagcgaataactctaccgagcaatctaccggtagcgaactgaaatctgatgcagatttaaaactgtttagtcagcaagatacgactatcgttggcagtctggtcaatagcgccgatgagttagggattaaaacgctgggcaatctgaatgttaaatcagccgttgaacagcaaaagattgacgaaaaaaccacatcgctgaaagtcgatgcctatgccaaagaacatagcgataaacaatatcgtgccggcctgcgcattgagcataccagcgaaacagaaaaaaccgacagcaccaagaataaagcggcaaccctcagcggcggcagcgtaaaaatcgaatccgataaagacgttacctttactggctcgaaactggaaacgaccaaagacgacgctaaaatcagcggtaataacgttgcttttctggctgcagaagacaaaaccaccagcgacaaaaccagcacaaaagttggcggcggcgtttactacactggcggtattgataaagcgggcagcggtgtagaagttggctatgaaaatagcaaaactcacactgacgcgaacaaagccgcggcatccagctccaacgtagcgggaaactttaccgttgaggcaaaaggcgatctgaccaaccaaggcactcagcataaagtgggggagaaactgacgcaggaagcagcgaatgtgaataacctcgcagctaaaaataccaaaaacagcaaaactgaaacgttaacaatcggtgctgaagtcggcgctaacgttgattacagcggcattactcgtccggcagaaaaagcgattgataagattgctaaactggacattctcggtgccgctaacgatttgggtgatattggcctgccgaaccttggtatcgatgtcggagccaacggcagcagcagcgatgtcactaaaaacagctcaaaagcgctcgttacttccgttcaggctggcagcgttgccacgaaaaccacaggcacagtgaaagatcagggcacgcaatacgaagccactaaaggcggcgtaaccattgaagcccaaagccacaccagcgaagcggcagccaatactgaaaccgttaatagccgtgagaccaaaggtaacgcagatctacgtgtttatacctccactggcagcgatatcagtgccgatgctaaaggcgaaggcggtactacccgtagcgaaaaagacgccagcaacgcggtcaccggcaagattaaagcggccgatggcattagtatcaaggtcaaagaggacgcgacttatcagggcacctctctggacgcaggcgcgggtaaaaccagcgtcaaagccggcggggacatcaaattcgatcaggccacggataccagcagcgagaaccataaaggctttaacgttaagctttctgccaaaggcggcagcacgccagagagcaacaacttcggcattggtttgggcggcggtatagacaacggcagcagcagcacttccgatgccaaagtgagtcagttggcgggtaaacaaggcgtagaactggattccggccgtgatttaacgctgaaaggcagccagattggtagcaaagagcagccaaccggcaatgtcacgctgaaagccgcgggcaaggttgatttgcaagcagctgaatccaccagcagcaaggaaaataccaagctgtctggcaacatcaatgtcggcaccagcagtaccgattctgaaaccaagagcggcggtggtttcaatctgggcggcgacgttaacttcgataaagttgatgaatcagccacgactcgtcagggtagtaaaatcgacagcaaagggacgctgaagattgaatccggcagcgatgacaaacaggctatccatttgcaaggcaccgaagtcaccagtaaagcaacggttctggatgctaaaaaaggtggcatagtgctggagtcagcgcaaaacgaagagaagaaaaacaactggaatttgggtctgaaaggcagcgcaggcatttctcaatcttatgataagaatgacaaaggcgtagtcgacagcgaatctggcaaagactctcataacgttagcgcgggtatcaacgtcggcgttgagaaaaaagatgcggttaaacaacagaataccaagattaataccggtaatctgacgttgaacagcggaaaagacaccacgctggctggtgccacagtgactgcggataaagtgagcggggatgtaggtggcgatctgcgtgtcgaaagccgcaaagatcgtgaaaccggtgtcaacgttggcgtggatttaggtttaagccacaccaataaaaaagaagataatctggtaactcgcgtttctgatgccagcccggtagggaaggaaaaaatcaaaaacgccttggaaaccaaagctaacaaagcctttgataaggttgaagataagtacaataagttcgctcacaaaaacgaccctaagcaagacaccaccaatgccgtgagctttagtaaagccaacgataaagtgaccttgccagagaaattggttgaggaaaaaactgacagcgcggtttgggataaaggcgctcgttgggcgggtaacaaagtgaaaaacaaagtcgttggcccggcagaagaaattggtctggatggtcacttcaaagttaacgctaacgtggtaaataacgatgccattaacgaaacctcagcgatcagcggtaaagaaggcgtaacgctgaacgtgaaaggtaacaccttgttaaacggcggaaaactgagcagtgatcaaggcaaagttgaactgaaaaccaaagctcttgagttacaggaagtcaaaggtaacaactatcagggcggcggcggctttaaccttgcgccaaccgtttctggtttgctcaccggcggtgcgaaagatgtattgagtggcaacactccgtttattcaggcccataccaagtctgaaaaccgtgatgtaaagggtggaattgaagaaggcaaaaaggatgataaggctgaagaaaccgagtaatcaaagctgaatcaaaggggttttagggacattatctgcgcctaaaaccccacctgaacatgaaaaaccggcgctgcctatctggcacgccggtttcttttagcactcacactcatttatcaatctgcatcgtaacccagattaggggccagccagcgctcgacttcggctatcggcatcccttttcgcgccgcgtagtcttctacctgatctcgctgaatctgcgctacggcaaagtatttgctttctggatggctgaaataccagcctgaaaccgaggctcctggccacatggcgtaggattcagtcagtttcattccggtgtgagtctccacgtccagcagcttccagatttgccctttttccgtgtgttccggacaggccggataacccggagccggacgaatcccctgatagttttcccgcaccaattcttcattactcaggttttcatttggcgcaaagccccagtacaccttgcgcacccgctcatgcagatattcggcaaaagcctccgccaaacgatcggataaggctttaatcatgattttattgtaatcatcatgctgagcatcgtaagcctccgccagagcatcttcctccagtccaccggtcacggcaaaagcgccgatgtagtcagctttaccgctggtttttggcgcaacgtaatccgccagacaataattagggaagtcatttttttccgtttgctgccgcaaatggtggctcaccagcagcacgtcatcgcgacgttcatcccgataaatctcaatatcatcacccacccgattggcagggaacagacccaccacgcctttaggatgcaatgatccttctgatgagagcttatccagcatctgatttgcatcagcaaacagacgcttagcctcttctcccaccacttcatcttccaaaatgcgcggatacttgccggccaacgaccaggtcataaagaatggtgtccaatcgatataatttcgcagtgtttcaatgctggcttcgacctgctgaaccccaagcttatggactaccggcggcgtataattttcccagtcaatcaccgtagcgttatcccgcgcagcttgcaggctgaccggcggcgtccgcggttttttacgcgcatgctgaatacggacggtttcatactctttgcgagttttagcaataaattcgtcccgttgcgcgtccgaaagcaacgccgataccaccccaacactacgagaagcattagaaacgtaagtggttgagccgctgtagttttgctcaatcttaaccgccgtatgcgctttggacgtggttgcgccaccaatgagcaacggcaaggtaaagccctggcgttccatctctttggctacgttaaccatttcatccagcgacggggtaatcagaccggataaaccgataatatcgactttttcctctcgcgcagtgcgcaggattttctcggttggcaccatgacacccaaatcgataatttcgtagttattacactgtagaaccacgccaacaatgtttttaccgatgtcatgcacatcgcctttaaccgtcgccagcaggatcttgccggcggtggtgcctttctgcttactggcctcaatataaggttccaaataggccacggcctgtttcatcacccgggcggatttcaccacctgtggcagaaacattttgccctcgccaaacaaatcacccaccacgttcatgccggccattaacgggccttcaatcacttcaatcggtctgtcggcttcctgacgagcctcttcggtatccagttcgataaattcggtaatgcctttcaccaacgaatattccaaccgtttcaccaccggccagcctcgccattccgcctgctgcaccgcaacttcatcacttttgctgccacgaaacttttcggcgatatccagcagtcgctcggtgctgtcattacggcggttcagaatcacatcttcaaccgcatcacgcaattcatcggataaatcgtcgtaaattgccaattgacctgcgttgactatccccatatccatgccgctgcgaatggcgtaatacaggaaaaccgcatggatcgcttcacgtaccgggtcgttgccacggaacgagaaagaaacgttggaaacgccgcctgaaatgagggcgtgaggcagctcgcctttaatatccgcacaggcctcaataaaatcaacggcatagttattatgttcttcaataccagtagcaacagcaaagatatttgggtcaaaaataatatcttccggcgggaagccgacggtttccgtcagcagcttataggcgcgacgacaaatctcgattttgcgcgcgcgagtatcggcctgcccagcttcatcaaaagccatcactaccatggccgcaccgtaacgacgtaccaatttagcgtgatgaataaaggctgcctcgccttccttcatcgaaatcgagttaacaattcctttgccctgaatgcacttaagccccttttcgatcacgtcccatttcgaggaatcgatcatgataggtacgcgggcaatatccggttcaccggcaatcagattcaggaaacgcaccatcgccgcttccgcatccaacatgccttcatccatattgatatcaatgatttgcgcaccgctttctacctgctggcgagccacatctaaagcttcagcgtatttctcttccttaatcagccgtttgaaacgagcagagccggtcacgttggttcgttcgcccacgttgacaaataacgtattggcatcaatggttaagggttccaacccagccagacggcaggcgaccggaatctgcggtaatgcgcgcggcggcatgccagcgacggcttttaccatcgcggcaatatgacgcggcgtagtcccacagcagccaccaacgatattcagaaagcctgatcgcgcccattcagcgatatgctcagccatttctttggcgtccagatcgtattcaccaaaagcattcggtaagccagcgttgggatgagcactaacgtaacactctgaaattctggataactcagccacatactggcgtaactcatccggccccaaagcgcagttcaggccgaatgacagcggttttacgtggcgcaatgaattataaaaagcttcggtggtttgcccggaaagcgtgcggccagaggcatcggtgatggtgccagataccattaccggcagcaccacgcccaaggcttcaaattcggtttctaccgcaaaagttgcggctttggcgttcagggtatcgaacaccgtttcaatcataataatatcgacgccgccctccaccagcgctcgggtggattcgcggtaggcttccaccaattgatcgaagctaacgttacggaaagccggatcgttaaccttgggagaaatagaggcagttcggttagtcgggccaagcacaccggcaacgtagcgcggtttatccggcgttcgggcggtccattcatcggcgcagagtcgggctagtcgggcggcctcgtagttaatctctgccgagagcgactccatttgataatccgccatagcaatggtggtggagttaaaggtattggtttcaagaatatccgcaccggcttcaagataagcattgtgaatggcggtaatcacttcgggcttggagagaaccaatagatcgttatttcctttcagatcgctcggccaatccgcaaaacgttctccgcgataatcggcttcttccagacgatagctctggatcatggtgcccatgccgccatctaatactaaaatacgttttgccagctgctggtgcagtttttctactcgatttgtcactgtcgcctcttcgcctcgatgccctgccaaatatcatcccagcccatatttcagagccgtttaacctatcggaactgctgcaaaagccagcaagccatcctagcacaagttataaggctaatgagtcgacgggaagttgagactttttcaggtagaaatctgcacacatcggatgagcgttttggcccattagcatgcataattataaaacgaaaatgaattccattatatttccagggagctgatttatgacgataccgattcccattaaacggggaaagaaaacaaaggctagtggagctacatcagcagcggctaccggtcaggttcaatcattgactcgcggccttaaattactggaatatatttccgaatcccaaggtcaggttgctctgacggatctggcacaacaggccggtttacctaattcaacgactcaccgcttgctgactactatgcaacagcagggcttcgtacgtcaggtgggagatttagggctgtggaccatgggcgcgcaagcgtttgtcgttggcagcagctttttacaaagccgcaatctactggccatggtacatccgattctgcggcgtttgatggatgaatccggcgaaaccgtcaatctggcggtattggatcacagcgattatcaggcgatcattatcgatcaggtgcaatgtaccgcgctgatgcgtatgtctgctcctattggcggtaagcttcccatgcatgcttccggtgcaggaaaagcgttcttgtcgactctgtcagatgaaaagctggtgcagctactccataaaaaaggtctgcacgcctacacccaacacacccgcacgaatccggtcagtttaaaagagaatttggcgcaaattcgcaagcagggctattccttcgatgatgaagaacatgcgctgggcttgcgttgtatcgctgcctgtctgtatgacgaacatcatgaagccttcgccgctatctctatttctgggccggtttcacgcatcaccgatgaccgcgtgaccgagctaggggcgctggttattcacgccgccaaagaaattacgcaatcctacggcggcggtaatcgctaagtaaaatgcctcactcgcgcgccgctagtggggcaaaaatcaccctataatccgttgtgagaagcgctgcttacgccgataggcgaaaacatcctccacatgcccatgacgaatacgctgttgcaaaccgcgccagtattcagcgtggaataaatcctcgtgcatctcttcaaagcaggctctgacttgcggatcgctgcaaagaaaatggcggaactcttcaggaaaaacatcatttggagaaacgctgtaccaaggctcgctagccatttcgtcctccggatagcgcggcggaggaatatcacggaaattcacttcggtcatataacaaatttcatcgtaatcgtagaaaacgacgcgtccgtggcgcgtgacgccaaagtttttaaacagcatgtcgccggggaaaatatttgctgcggctagctgttttatcgcattgccgtattcttcaatcgcgtcccataactgccgctcattagcctgctccatatagatattcagcggtatcatgcgccgctccatatacagatgcttaatcacaatttggtcgcctaaatcttccagtttttccggcacttccagccgtagctcggccagcagttcctgactgatacgattcttatcgataacaaaattttcaaattcctgagtatccgccatgcgcccaacgcggtcatgctctttaactaactgatagcactcctgcactcgcgcctggctgacctctttttgcggagcaaactggtctttaatcactttgaatacccgatcgaaggacggcaaagtaaataccagcatgaccatgcctttcacccctggagcaacaataaactgctcatcggattgatgcacataggtgagatattcgcggtagctttcggtttttccgtgcttttgacagcctatcgccatatacaattcggcggtagatttgcccggtaaaatttcccttagccattccaccatcgccgctggcaacggggcataaaccatgaaataggagcgagcgaaaccaaacacaatactggcctcggctttgctggtcaggcaggtgtcaataaataatgctgccgattcattgtgatgaatcggcagtaagaacggatgtactccgtcagacaatctgagctttcccactagccacgccgctttattacgataaaacagttcgttggcaatctggaagcgagcggtagccagttgctgcgggctaaatgcctgttggagcgcagcaacgatatattcaatgtctctgggcagattttcccaaggtaaacgaaggggtaaatcattcaatatcgtctgcaacatcgcagataaaccctgctctggcgtaaaatcccgcgccaatggccgtggaatatcgcgaaaacgtcgttccggctgggagctgaaaacaaagagcttgtcctgagttaactcacggtgtttaaacaggcggcaataaaccgagttaaaaaagctttcggctatttcgaaacgtggataatccggcaatagatcggtatagatagcttttacccgcgccagaaattcggcgtcaaaacttccgctgccggtaatgcgttttagttgctccaccaccagtccaacgtggtgatcatagagatgaattcgctttttcatggcttgctgaatcgcttgccagtcggcctgctcaaagcgctgctgagcgcctgcggtcacttccagaaagcggccatactgtgcatcaaaaccctgcaaaatagtttgggcgattaactgctctaagcttattgccatgctcacctcccgctacacggaacagagcctgcatacgcaggctccggttaacaatgattgctagttcggcagtaggattagaactgctgctcttctgtcgatccggtcagcgccgttactgaagattcgccaccctgaatgatattggtcactttatcaaagtaaccggtccctacttcctgctgatgggaagcaaaggtatagccacgatccaccgaggcaaattcaggctgttgcactttctctacgtaatgcttcattccttcgccctgagcataggcgtgcgccaggtcgaacatgttgaaccacatgctgtgaataccggccagcgtaataaactgatatttgtagcccattgcagccagatcttcctggaagctggcaatttgcttatcgctaagattctttttccagttaaaggacggcgagcagttataagccagcaatttacctgggaatttagcgtgaaccgcatcggcaaaacgcttcgccagcgccaagtccggcgtagaagtttcgcaccacaccaaatctgcataaggggcataagccagaccacggctaatcgcctgctcaataccggcgtgagtgcggaagaagccttcggcggtacgttcgccgctgataaattcacgatcgtaaggatcgcagtcggaagtcaacagatccgccgcatcagcatcggtacgagcgatcaataaggtcggtacacccaatacgtccgccgccaagcgcgcagcaaccagtttctgaatagcttcctgagttggtaccaataccttgccgcccatgtgcccacatttcttcactgccgccagctgatcttcgaagtgaacgcccgctgcaccggcttcaatcatggctttcatcagttcaaaagcatttaacacaccgccaaaaccagcttccgcatcagccacaatcggcaggaaataatcggtataaccttgagtacccggctcgatattattcgaccattggatttggtcagctcggcggaaactgttattaatgcgtttaactacggcaggaaccgaatctaccggatataaagactggtccggatacatgctggatgcggtattggcatctgccgcgacctgccaaccggacaaataaatagcttccacaccggccttagcctgctgcaaagcctgaccgccggttaatgcgcccaaacagttgatgtagcctttacgagcgccaccatgcaataaatcccacagtttttgcgcaccgtgctgcgccagcgtgcattccggattgaccgagccgcgcaatttaatcacttcttcagcgctgtaaggacgggtaatcccttcccagcgcgctgatttccagtcttgttccaattgcttgatttgttgagcacgagaggtagtcattgttcttatccttattattaatttgtagggttatgccagcagcgcgtagccaggcagggtcaggaagtcgatcagctcgtcttgtgttgttatacgttccatcaactgagcggcttctttaaagcggccggaatcaaagcgttcggaaccaagctcttgcttaacaacctgcatttcttcactcaacattgtgcggaacaattctttagtgacttttttcccgttactcagggatttttggtggtgaatccattgccagatagaggtacgggatatctcagccgtcgcagcatcttccatcagtccatagataggtacgcagccgttaccggagatccaggcttcaatgtattgcaccgccacgcggatattggcgcgcataccttcttcggttctttcaccagaacagggctctagcaattcagcggcggtaataggtttatcctgtgcacgactcacttccaattgattcggacgattccctaatacgcgattaaatacttccatcaccgtatctgccaaccccggatgcgcaacccaggtgccatcgtggccattagtggcttccaattctttatcggctcggactttatccaacacccaagcgttcttctctgcgtctttactcggaataaaggccgccattccccccatagccaacgcaccgcgcttatggcaggtttttatcagcaggcgagagtatgcgctgaggaaaggttgagtcatggtgacggattgacgatcgggcaaaacgcgatcgctatgattcttcaatgttttgatatagctgaaaatgtaatcccagcgtccgcagttaaggccaacaatgtggtgacgcaggtgatataggatttcgtccatctgaaacactgcaggcaatgtttcgattaataccgtggctttaatggttccctgcggcaaaccaaagcgctgttccgtaaaggtaaagacgtcgctccaccaggcagcttcttggtaggactgcattttgggcagatagaaataagggccactaccattcgccagcaggtgttcataattatgtaagaaataaagggcgaaatcgaacagaccaccagagatagcttctccctgataagtcacgtgtttttcaggtaaatgcaggccgcgcactcgcgcaatcaaaaccgccggatttggttttagctggtaaatcttgcctgattcattggtataagaaatagttcctttcaccgcatcatgcaggttaatttgaccttcaatcactttatcccaactcggtgccagcgaatcttcaaaatctgccatgaagactttcacattagcattcagcgcgttaatcaccattttgcgctctaccgggccggttatctcaacccgacgatcctgtaaatcagcagggatattctgaattttccagtcaccattgcgaatggaagtggtttccgaaataaagtccggcaatccgccattatcaatgccatgttgccatttctcgcgtgcagcaaggagttgacagcgacgttctgagaattcagcaaccaattccgttaaaaactcgatggcctgagcggtcaatacctgacgctccgcagtggaaaacttctgcgtgaagactaactccgtgcctactaactgttgtgtcattaccctttcctcatcccaatctgacggcatatacaccaacgcacaagcggcgtacttaccgcctgagacgcattttatgagtcattggcggcaagattttctggtcgtttttcaccccaacagaattaagaataatcaattaatcatgaaaatcaaaaacgatttccatttttatattaaatatttatttaatctttatttatcaattgattaacacaaataacaaaatacacacttcaggaaaggcattccataaatgacaaaattccgttgtaacatattgtttaatatagagattagaccagttggaaagggattgtttatgcagaatagcagaagaaatggttaggcggcatcgattcagccgccatataaagatgaaatcagtcgagagtcgggttcatttgacgtagatcgaacggcgtaatctgatagacataataattgagccaattggcaaataataagtgtccatggctacgccatgaggctaatgggcgctgcgtaggatcattctgtgggaagtaattcagtgggacagcaggttccagacccgcagcccgatcccgcgcatattcccctgccagcgtatccacatcgtattccggatggccggtaacgaaagcgactcttttatccttactggcaaacagataagcaccggcctcatcggaagccgccagaatatccagatcggtgtattgctgcaaaatctcaatcggaaaatctgcataacgggaatgaggggcaaagaagctttcatcaaaaccacgggtcaataacgccaaaggtttcagggtttgatggcgataaatcccagacaatttttccttacgagttagtttgggaatcccatagagaatgtttaaggcggcctgcactgcccagcagacaaatagcgttgatgtcacatgatccttggcccaggtgataatgcgttctatctgcggccaataggcaacatcgctgaaatccactaacccaagaggagcgccggttacgataagtccatcaaaattctgatttttaatctcttcaaaatcgcaatagaagttattcagatgctccgctggcgtatttttcgattcgcggctatccactcgtagcaattgaatatccacttgcaggggcgagttcgacagtaaacgtaaaaactgattttccgtttctatcttcttaggcattagattcagcaccaatacttttagcggtcgaatttcctgagttttagctcttgatgaagtcatcacaaaaacattctcattacgcaagaaactcaccgcaggtagttcatcagggacccgaattggcatgcctacatcctcaatatatccgtttatacgtttagacttccagacacctgaagataactttttccaaatacaaagtcgagtgatcaacaacaacctgaaaatgtttcattgcggtattaaaccaatgcgctgctgtcctttacttccgcagcgcggcctcgcatttagcctgattgcaaaatcaccctcaatgataggaacaaataaccaaaaaacataaatattatttagctattggcgcaccagtgaaattggttaacatcgtataaagctgactaatcatgcatattaacaacaataaatagacaaaatcagtgagttatggtgattatgttggcaatattgcatcatcaaaggcgatacagccactcaatatcctagcaccggattaattaaaataattaatgcagttattctgggcgccagagagtgactcgttacttataaaaccaaggaagtattaagatctcaccaatggctctattttataaaggtttatatttataaggttgctagattgtggcgacaagtgacgccgataaatcgaggaaactactcagagagtactatatagatttagagaaagttaaaataggtgcgtattactgctgatattttgacaaatttcagatacaaaaaaggccatccgttaggatggcctcgtttgtttatttgatacctggcagtgtcctactctcgcatggggagaccccacactaccatcggcgctacggcgtttcacttctgagttcggcatggggtcaggtgggaccaccgcgctattaccgccaggtaaattcttttctaagtgccgaacttaaacccatataactggtgctgatacccagagtcgaactggggacctcacccttaccaagggtgcgctctaccaactgagccatatcagcacaactaaatttgatgcctggcagtgtcctactctcgcatggggagaccccacactaccatcggcgctacggcgtttcacttctgagttcggcatgggatcaggtgggaccaccgcgctattgccgccaggcaaattctgtttcaatcaacccgccacgtgatttacaccacacagccagtcaatccaatctgttaacaatgctgaaaatcaaaacgctctctaaaacaccttcggtgctgtaaggttaagcctcacggatcattagtactggttagctcaatgcatcgctgcacttacacacccagcctatcaacgccatagtctttaacgttccttcagggggcttgaagccccagggaagactcatcttgaggcaagtttcgcgcttagatgctttcagcgcttatcttttccgcatttagctaccgggcaatgccattggcatgacaacccgaacaccagtgatgcgtccactccggtcctctcgtactaggagcagcccctctcaatcttccaacgcccacggcagatagggaccgaactgtctcacgacgttctaaacccagctcgcgtaccactttaaatggcgaacagccatacccttgggacctacttcagccccaggatgtgatgagccgacatcgaggtgccaaacaccgccgtcgatatgaactcttgggcggtatcagcctgttatccccggagtaccttttatccgttgagcgatggcccttccattcagaaccaccggatcactaagacctactttcgtacctgctcgagccgtcactctcgcagtcaagctagcttatgcctttgcactaacctcacgatgtccgaccgtgattagctaaccttcgtgctcctccgttactctttgggaggagaccgccccagtcaaactacccaccagacactgtcctcaccccagattatggggccgagttagaacatcaaacattaaagggtggtatttcaaggttggctccacgcagactggcgtccacgcttcgatgcctcccacctatcctacacatcaaggctcaatgttcagtgtcaagctatagtaaaggttcacggggtctttccgtcttgccgcgggtacactgcatcttcacagcgagttcaatttcactgagtctcgggtggagacagcctggccatcattacgccattcgtgcaggtcggaacttacccgacaaggaatttcgctaccttaggaccgttatagttacggccgccgtttactggggcttcgatcaagagcttcgccttgcggctgaccccatcaattaaccttccagcaccgggcaggcgtcacaccgtatacgtccactttcgtgtttgcacagtgctgtgtttttattaaacagttgcagccagctggtatctgcgactggcttcagctccgagagcaagtctcttcacctagcgccagcgtgccttctcccgaagttacggcaccattttgcctagttccttcacccgagttctctcaagcgcctgagtattctctacctgaccacctgtgtcggtttggggtacgatttaatgttacctgatgcttagaggcttttcctggaagcttggcatcaactacttctgcaccgtggtgcatcgtcatcacgcctcagggttgatggttttccggatttaccaggaatacccccctacacgcttaaaccgggacaaccgtcgcccggctagcctagccttctccgtccccccttcgcagtaacaccaagtacaggaatattaacctgtttcccatcgactacgcttttcagcctcgccttaggggtcgactcaccctgccccgattaacgttggacaggaacccttggtcttccggcgtgcgggtttttcacccgcattatcgttacttatgtcagcattcgcacttctgatacctccagcagtcctcacagactaccttcaacggcttacagaacgctcccctacccaacaacacctaagtgtcgctgccgcagcttcggtgcatggtttagccccgttacatcttccgcgcaggccgactcgaccagtgagctattacgctttctttaaatgatggctgcttctaagccaacatcctggctgtctatgccttcccacatcgtttcccacttaaccatgactttgggaccttagctggcggtctgggttgtttccctcttcacgacggacgttagcacccgccgtgtgtctcccgtgataacattcttcggtattcggagtttgcatcggtttggtaatccgggatggacccctagccgaaacagtgctctacccccgaagatgagttcacgaggcgctacctaaatagctttcggggagaaccagctatctcccggtttgattggcctttcacccccagccacaagtcatccgctaatttttcaacattagtcggttcggtcctccagttagtgttacccaaccttcaacctgcccatggctagatcaccgggtttcgggtctataccttgcaactagacgcccagttaagactcggtttccctacggctcccctatacggttaaccttgctacaaaatataagtcgctgacccattatacaaaaggtacgcagtcacaccacgaaggtgctcccactgcttgtacgtacacggtttcaggttctatttcactcccctcgccggggttcttttcgcctttccctcacggtactggttcactatcggtcagtcaggagtatttagccttggaggatggtccccccatattcagacaggatgtcacgtgtcccgccctactcatcgagttcacagcatgtgcatttttgtgtacgggactatcaccctgtaccgtgcgactttccagacgcttccactaacacacaaactgattcagactctgggctcctccccgttcgctcgccgctactaggggaatctcggttgatttcttttcctcggggtacttagatgtttcagttcccccggttcgcctcgttagactatgtattcatctaacgatagtgcaacgaattgcactgggtttccccattcgggtatcgtcggttgtaacgcttcatatcagcttaccgacgcttttcgcagattagcacgcccttcatcgcctctgactgcctaggcatccaccgtgtacgcttagtcgcttaacctcacaacccgaaggtgtctttcgacatcatcgtgctgcgattattgagagactctacctgcaggtgactccttgtctcggtaaatctacggagagacaagttttagctgcagtgtttcaattttcagcttgttccagattgttaaagagcaatatttcacaacatactgtccaccttgcggcagcaatatattttgaaatagttttatatggtggagctaagcgggagcgaaccgctgacctcctgcgtgcaaggcaggcgctctcccagctgagctatagccccatataaaaagcaaataccttattgctgcaactcatgtccagacaaggcgcagacacgcacgtttattgttataaacgaatgtgacggtaacgcactacagggatgagttggtgggtctgagtggacttgaaccaccgacctcacccttatcaggggtgcgctctaaccacctgagctacagacccaacaaggtactaaagcccgactaatctctcagcccggccttatttgctcgttactttctatcagacaatctgtgtggacactgcgcaatgcgtatcattaggtaaggaggtgatccaaccgcaggttcccctacggttaccttgttacgacttcaccccagtcatgaatcacaaagtggtaagcgccctcccgaaggttaagctacctacttcttttgcaacccactcccatggtgtgacgggcggtgtgtacaaggcccgggaacgtattcaccgtagcattctgatctacgattactagcgattccgacttcatggagtcgagttgcagactccaatccggactacgacagactttatgtggtccgcttgctctcgcgagttcgcttcactttgtatctgccattgtagcacgtgtgtagccctactcgtaagggccatgatgacttgacgtcatccccaccttcctccggtttatcaccggcagtctcccttgagttcccaccatgacgtgctggcaacaaaggataagggttgcgctcgttgcgggacttaacccaacatttcacaacacgagctgacgacagccatgcagcacctgtctcacagttcccgaaggcaccgaagcatctctgctacgttctgtggatgtcaagagtaggtaaggttcttcgcgttgcatcgaattaaaccacatgctccaccgcttgtgcgggcccccgtcaattcatttgagttttaaccttgcggccgtactccccaggcggtcgacttaacgcgttagctccggaagccacgcctcaagggcacaacctccaagtcgacatcgtttacagcgtggactaccagggtatctaatcctgtttgctccccacgctttcgcacctgagcgtcagtctttgtccagggggccgccttcgccaccggtattcctccagatctctacgcatttcaccgctacacctggaattctacccccctctacaagactctagcttgccagtttcaaatgcagttcccaagttaagctcggggatttcacatctgacttaacaaaccgcctgcgtgcgctttacgcccagtaattccgattaacgcttgcaccctccgtattaccgcggctgctggcacggagttagccggtgcttcttctgcgagtaacgtcaatcacttcacgtattaggtgaaatgccttcctcctcgctgaaagtgctttacaacccgaaggccttcttcacacacgcggcatggctgcatcaggcttgcgcccattgtgcaatattccccactgctgcctcccgtaggagtctggaccgtgtctcagttccagtgtggctggtcatcctctcagaccagctagggatcgtcgcctaggtgagccattaccccacctactagctaatcccatctgggcacatccgatggcgtgaggccctaaggtcccccactttgctcttgcgaggttatgcggtattagctaccgtttccagtagttatccccctccatcaggcagtttcccagacattactcacccgtccgccgctcgccggcaaagtagcaagctactttccgctgccgctcgacttgcatgtgttaggcctgccgccagcgttcaatctgagccatgatcaaactcttcaatttaagatttgtttgatttgctaccgaagtagcgatgctcaaagattactttctgcaaatatgcattcgaaccgaagttcaaatgttcactgctttggtcactcttcaagacttgatatttcttctgcctgccgaaacaggctttgatatcgtcttgcgagtgcccacacagattgtctgataaattgttaaagagcagtgagttagcaacctttcggtgggtaactcgaggtgcgcatattacgctttcctcactcagagtcaactacttatttcgttgaatttctctgttctctttgccggccactcagttacttgattcgctgtgtgccgtctcgatggatgcgcattatagggagtcgaattttttgcacaactcttttttcgcctttttctactgtttgaatacttttcgctccttacgggtagatcttgcacgatctccgccattttcggctcgatccaaccggctgtctggttgtaattccaccagcaaaggatagtattgccagtaaattatgatcttattacggggctttgttatgtctgattctattcgtcgttacctaaattacactccgatccttggccagaaggtaatgatcgataaatcgagcgtagtgatcggcaatgttttgctcggtgatgacgtcagcgtgtggccgttagttgctattcgcggcgatgtaaatcaggtcaaaattggtgctcgcaccaatattcaggatggaagcgtcttgcatgtcacccatcagtccgaatacaaccctacaggtcatcctcttatcatcggcgaagacgtgaccgtcggacataaagcgatgcttcacggctgcacgattggtaatcgcgtattagtcgggatgggttcgattctgctggatggcgcggttatagaagatgatgtgatgattggcgctggcagtttagttgcgcccggtaaaagattagtcagtggttacctttatatgggaagcccggctaagcagattcgtccgttaacccccgcagagctggaaggattgatttactcggcaaacaactatgtacgttggaaggatgattacctggctgaagaaaagtaataccccccttcttgttctctatctatatagagggaaacaatagactccctctatatagacatatatctgatgcctaaataaaacgacacctatgccaatcagtggccgagttcttcgctcaaaagcgctaataccggcgtaatctccggcatcacgccatgccaaagataaaacgcatgcgccgcctgccctaccaacattcctaaaccatcagcatactgcgttgctcccaacgcggaggcccaagtaaggaagggcgtatctccctgttgataaaacatatcgtaacaacgagtgtttggggcaataagagaagcagggagtgcgggaacgtcgccatgaatgcccgaagctgtagcattaataacaagatcgaagcactgcccttcaagatctgccatttctactgcttctatttcgccaaggtgcctaaacacttcggataactgctgcgcccgactaaaagttcggttagtaataacaatcttacaaccaaaagaaagcagaggcaggataacgccacgcgcagcgccaccggcaccgaccagcaggatacgatcctgcggcttgatcagctccaaacgttccagatcgctgagcaaaccgataccatcggtgttatctccgagtaagcggccatcttccaaaacctttaaggtattcaccgcaccggcaaattcggcacgctcagttaactccgccgatgctgcataagcccgctctttaaatggcgtggtgatatttgcacctttcgccccctgagcaaaaaacgtagccagcgttgtttcgaactcatcatgaggagccagcaccgttccgtaatgatgctcaatacccgtttgggcggcaaaaagggcatgtattcgcggcgacttactatgggctatcggattgccaaaaactgcaaacggttgttccactctctttccttaaccttgacggaaacgctcaccggtgagggcatcacgaatttcagatggatttaaacgcccgcccaccagcccggacaatactgccagatcggttccaagctgctttcgaacctcttcttccgtacggcaaggctctaacccactgaggttcgcgctggttgaaaccagaggctttccataataggtacacaactgttgcactaagggatggtcgctaacccgaacggccagagagtcaaagtgccccgtcagccaacgaggcgtcgttttcctggctggaataacccatgtcaccggaccgggccagctggcaaatattgttgcgcgttgcgtttcatctaactgcgagtcatcaatataaggcaagagttgctcataatttgctgcaatcagaatcagccctttctgccagggacgctgttttaacgccagcaaagcatttaccgctttttcactatcgggatcgcaacccaggccgaatacagcctcagttggataggcaataacgtcttcttgctgcaaagcttgcagtacaccttcaaaaagggagatatcttctttacacatgggttcttactcgattgccactggtttcccacataatttgctagcacaaaaacgcttcacgccctgcgcagtgcgtttttccattagaagcgggtagtggcaatgggcacattctccggctataggttgctgattaagcgcaaattggcagtcaggatagcgattacaagcgtgaaaaacctttccaaaacgggatttacgttgcaacagttttcccttaccgcattgtgggcaagtaatagatgtttcatctggtttatcgataacttcggtatggtcacattcaggatatttgctacagccaataaacataccgtagcgcccttgtcgtaacaccaataccgcctgacacttcggacattcctgcccttccaacactttaactatgtgtccgtccgcctgcgcctttaacggccgcatatattggcattcggggtaatgagaacaaccaagaaacgggccatgaccaccgcggcggatcactaatgctgacccacactcagggcaggacccattatccttcgcagttgcagtttttgtcataacgctttctctaatcgattaatctgcgccgatattaccacctagtgcagataaccctcattaacttcaaagagcaattcttccatctgttgataggcattttcatattcaggcacgttgaacagcaccatcagcaccacccatttaagatcttccagatcaaactcggctgaatcgagcgccataatacgatcaataaccatttcgcgggtatcgagttttagcacattaatttgttcgaggaataggataaaaccacggcattcgacgtccaacttcatgatttcttcaggagtatagatacgaagcgccaaaggatcggcactgtactgataaggcgctatttcaccttcctgtaaatcagccaacgcctccagccaattcaaggcgttatagatgtcttcacgatagaaacccgcatccgctagatcgtcagtaattttgtcctgatcggcgagcatttcggtgtcgttatgcatgtatgtttcaaataggtacatcaaaacgtcgaacatggcctgccctccttattcggacatagccgccgggtacagctgcgatccaccctgctaactccagctcgagtaatttcactacgatttctggcacagtatggccggcacgttcggcgacgacatcaatgggtgtcacctcatattctacgttagccaacacatcaggaaatggcaattcaagttgcggttctggcgcagaaataatttcttccataggcaaaggtagccaatgtaaggaactccccagctgctcaatgacctcccgcggatggcaaaccaggttcgctccttgctgaatcagccagtgtgtcccttcactcccagagctatcgagtgagccgggtagagagaaaacttcccggccttgctccaaagcataccgagccgtaatcaaagagccacttttacgcgttgcttcaatgacgatcacccccgcgcttagcccacttataattcggtttctccgagggaaatgagcggcaataggtaatgccgtagataaaaactcagaaaccagcgcaccgccatttgcctcaatttcttgcgccaatcgtccgtgccgcttgggataaatattggcaagcccactccctagaaccgcaatagttttaccaccgcaacccaatactgcctgatggcaaataccatcaattcctaacgccaacccgctagtaatcgccaggccactttgagcaagttcagcagcaaaataacgcgcccaacgctctccgtaatggctgtaactccgactgccaaccatcgctatctgcgatgcaagtaatagctctttatttccagaaacaaacaacagcaaagggggcgataaaatcgccattaactgcgctggatagccaggctgaccatagaccagtaaatggtggccaggttgttccagccaggataacgtcttctcgatataacgcgggtttaggctccaaaattgttgaatttgtttatcataaagccccgatttccgtagggcttctgcgctgatatcactgagttttagcaacccaatccctagtaagcgacttttgctggtatcaagcccctgaactccattgatccttagccatagctccgttgctaacattccccctccctggcggatttgtctgtcaacaccaatttgttcaattggtagtcgatgctgtcaatcggagccaaaaatgtctagaatagagactgaatatcattcaccaatcggacgcagatctagatatttatgtcagtattacaggtgttacattacccagacgaccggctgcgcaaagttgctgcgccggtaaaagaagtcaatgcagaaatccaacgcatcgtggacgatatgttcgataccatgtacgcagaggaaggcattgggcttgccgctacgcaagtagatgtccatcagcagattatcgttatcgatgtttctgaaaaccgcgatcagcgcctggtcttaatcaaccctgagctgctggaaaaaagcggtgaaaccggtattgaagaaggctgcctctctattcctgagcaacgcgccctggttcctcgcgcagaaaaagtcaaagtcagagccttggaccgtgatgggaaaccttttgaactggaagcagacgatctgttagcgatctgtatccagcacgaaatggatcatttggttggcaaactgttcgtggactatctgtcgcctctgaagcgtcagcgtatccgccaaaagctggaaaaactggctaagctcaacgcgcgcgctaactaatccttttttatgcaggaaaccaaacgtgtctgattcattgcggattatttttgccggaacgcctgattttgcagcgcgtcatcttgacgcgctactttcttccaagcaccagattatcggggttttcactcaacccgatcgccctgctggccgaggtaacaaactcactccaagcccggtaaaggttttagctgagcaacacgatattcctgtttttcagccaaaatctctgcggccagaagaaaatcagcatctggtagccgatcttaacgccgatatcatggtcgtggtggcttatggcctcatcctgccaaaagcggtgttggatatgccacgtttaggttgtattaacgtacacggttctctgctgccccgttggcgtggagctgcgccaatccagcgttcactctgggctggggacaaagaaaccggtgtcactattatgcaaatggacgtcgggttagataccggcgatatgctgtataaaattgcctgcgatatacagccggaagataccagcgcgagcctatacgacaaactcgctgaacttgggccacagggtatgctggccacgctacaactgttagcggaaggtaaagccaaaccggaagtacaggatgaaagtctggtgacttatgcggaaaaactgagcaaagaggaagccagactgaactggtcactttctgctgctcagctagaacgctgcattcgcgcctttaatccctggccggttagctattttgtcatcgacgaacagccgataaaagtttggcaagctcatgttctacccgcggcatctaatactttacccggcaccatagtacaggcggataaacagggtattcaggtggcgacggctgacggcgtgctgaatattactcagttgcagccagcagggaagaaaccgatgtcggcggcagatttgctcaattcgcgacgcgaatggtttaccgtcggtaatcagttggcataaccgacgaattttaacaacgacttcatcgcccgatacttcactatcgggctattctttccctttattttgctgacatttgtcagcttttttggctatgaaaaacacatataacctccgcagcatcgctgccaaagcaattagccaggtactggatcaagggcaatctctcagcaccgtccttcctggtctccagaaaaatatctccgataaagaccgcgcgctgttgcaggagttgtgttttgggactttacgcgtgctgccgcagctggaatggtgtattcagcagctaatggcacgtccgatgacgggtaaacagcgggtctttcattacctgatcatggtgggcatttatcaattgctgtacacccggatcccacctcatgcggctttggctgaaacggtagaaggcgccgtagccctaaagcgaccacagcttaaaggtttgattaatggcgtattgcgccaattccaacgccagcaggtagagttgttggaacgcgcagccaatcatgacagccgctatttgcatccaagctggttactggctcgaattaaaaaagcctacccggagcaatggcagcaaatcatcgatgccaacaatcaaaaaccgccgatgtggctgcgcgttagtcgcttacaccatagccgagcagattatctggaattgatgcaacaagcgggtattgaagcggaacctcacgctgaatacgccgatgccgttcgtttgatcactccatgtgcggtaaacgatctgcctggttttgctcagggttgggtgacggtgcaagacgcctcagctcaaggctgcgttgatctgctcgatccgcagaacggcgaacagatcctcgatttatgcgctgcacccggcggtaaaaccacccatattctcgaagccgctcccaaagcgcacgtattggcggtagatattgatgaacaacgtcttagccgcgtaaaagaaaatctgcaacgcctgcaactgaatgcggtggttaaggtcggtgatggtcgtacacctgatgactggtgcgaagataagctattcgatcgtatccttttggatgcgccttgctctgccaccggcgtgattcgtcgtcatccagatatcaaatggctgcgccgtgacagcgatattgccgatcttgcccaattgcagtcagaaattcttgaggctatttggcctaagctgaagaaagatggcgtgatggtttacgcaacctgctcaattttgccggaagaaaaccaacagcagatcgccgcattcttgcagcgccatccggaagcgcgtttagtagaaacaggctcagcggctcatcccggtaaacaaaaccttcctcacccggaagacggtgatggcttcttttacgctaagctaattaaaagctaatcaaacctcagagtagcggttattgttaggccttcgggcctactttcagggtaaacagagaacgcgatgaaaataattattctcggtgcgggacaggttggcgggacgctggcagaaaatttggtcggtgaaaacaacgatattaccgttgtggataccaataccaatcggcttcgtcaattacaggacaagttcgatctgcgcgtagtacaaggtcacggttcgcacccacgggtgctgagagaagccggcgcagaagatgcagatatgctggttgctgtcactaactccgatgaaaccaacatgatcgcctgtcagatcgcctactcattatttaatacacctaaccgtatcgctcgtattcgctctcctgaatatatccgtgaatctgagaagcttttcctaccggaagctgtcccaattgatcatcttatatcgccggaacagttagtaatcgattatatatataagctgattgaatatcctggcgcacttcaggtagttaattttgccgaaggtaaggtcagtattgccgcagtaaaagcttattacggcggtcctctggtgggcaatgccttatcttcactacgcgaacatatgccgcatattgatacgcgagtcgcggctatatttcgtcaagaccgacctattcgtccacagggttcaactattatcgaagccggtgatgaagtcttttttgtcgccgcctcccagcacattcgcgcagtaatgagtgaattacagcgactggaaaaaccctataagcgaattatgattgttggcggtggtaacgtcggcgccggattggcattacgattagaaaaagactacagcgtaaaattaattgaacgtgaccagcagcgagcggctgaattagcggagatgctacacgacactatcgtattttacggtgatgcctcagatcaggaattattagccgaagaacacattgagcaagtcgatgtatttattgccatcaccaatgatgacgaagctaatattatgtctgccatgctagccaaacgtatgggggccaaaaaagccatggtgctcattcaacgcagtgcttatgtagatttagtgcaaggcagtgtaattgatattgccatttcaccacagcaagccacgatttccgcactgctcggccatgtgcgcaaagcagatattgttagcgtgtcttcactgcgacgcggcgtagcagaagctatcgaagctgtcgctcatggtgatgaaagtacatctaaagtagtaggacgagtggttgaagatattaaattaccgccgggtactacgattggcgctattgtacgtggagatgaagtgcttatcgctaatagcagctcggttattcaacaaggtgaccacgttgtaatgtttattaccgataaaaaattcgttcctgacgttgaacgcttgttccaaccaagcccattcttcttataaggctataatcttaatttcagggacgagtgaattaattaaaactattcccatgggaaaggatgaaaaatttcctataattcttgaggtacagggatttctgttagttaagattgtttcgtttaattttgaaggggtgttgctatgagctttatgaaagaatttcgtgaatttgccatgcgtgggaatgtggttgatttggcggtcggtgttattatcggtgccgctttcgggaagattgtttcctcgctggtcgcagatattatcatgccacctctaggactgttattaggcggcgtggacttcaaacaattccatttcgtactacgtgaagcccaaggtgcgattcctgcagttgtcatgaattatggttcatttattcaaagcatttttgatttcgttatcgttgcactggcaatcttctctgcaattaagctgatgaataaaatgcgtcgcgaaaaagcagaagaaccagcggtaccaccggcaccaactacggaagaaaagttattagccgagattcgtgatttattaaaagaacaacaaactaaataatcacgatttcagtacgtcaaaagccatcgtaagatggctttttttattccttaaaaccagaaggccagtggtaaagaatctgctgattgtttgccactggcctcccagttaccgcctttcgcgtgttttgttttacgctgatagctgcctttccctttactatttttctctattcgctgcctgaacagtgggtcatgtaacaatgcttccagagcattatctttaattttgcctttagtgtgacggtaagtagtcatggtagatcctcattgtaataaacattgtttgaaaaacgttcgaatcatactgctgttcgtccagtaatgaaataactaggcaaacaaatttagtttcgcgaggtttcgtccgtagcgccttgctccagcgcttctaagatcgaacagtaagtgctggtatggtggctaccgcaacaggcatcgcttaaacgtttgagagattcccgcattttctgcaattctttaattttcccctcaacttcactgagtctggaatcgacgatcgatttggattcctgacatgtatgatgctcaggatcgactcggatcgataatagttccgcgatcgtctccagagtaaaacctaactgtttggcatatcggataaagcgtaaacgctgtaaatcctgttcattatataagcgataaccgccttcagtacgaatgccatgttccatcattccctgtttttcataatatcgcaccgtatcaggtgtgacatcggccagcttggccaattgacctattttcaacatcctgattctccagacagtttttcggataatggcagctgataatcaccgtgcaaaaaatcggtattcaatcccgcttgtttcaacttcagttcgagtaaacccagccgcttcgataatttctgatactccgcttcattgtgatctaattgcgcgagtagatgaataatagtcagtgcttcttgccgatcttgtaactcgacgggaatatagccagcattcttcagaattcgataactgaccctaagctcagtaggaatatgagtatcatcatcaagttccaggggcacaccaaaaccgggcaaattttcaagttcacctttttttgcgcatccattatgtgcctttcagcccattcatcaattaatgacatacacgtagttcccagctttaaccgatatacatagcataacgcattaggatgcagataataagcgagggaaataatcacgaagaacggctaagacggtcttattttgggcagggctgtcaatagacgtaaaaaaaccgggcaagcccggtttttttacgcgttcacagattactctgcagctactacttctgcttcagacgcagcacgatcaaccagctcgatgtaagccatcggagcgttgtcgcctgcacggaagccacacttaagaatgcgagtgtaaccaccggcgcggctcgcgaaacgcgggcctagctcgttaaacagttttgccacgatctcgttatcacgagtacgggcgaatgccagacgacgattagcaacgctgtcggtcttggcaagagtaatcagcggctcaacaacgcgacgcagctctttcgctttcggcagggtcgtcttgatgatctcatgacgaaccaaagagccggccatgttacggaacatagcctggcgatggctgctgttacggttcagttgacgaccactcttacgatggcgcatgaccttatccttctcagtaaaaccttaacctgtgatccggttactcgtcagcaatacttgctggcggccagttttccaggcgcatgcccagagacagaccacgtgacgcaagcacgtctttaatctcagtaagagattttttacccaggttcggcgttttcagcaactcaacctcggtacgctgtaccagatcaccgatgtagtggatagcttctgccttgaggcagttagcagagcggacagtcaattccagatcgtcaacagggcgcagcaagatcggatcgaactctggcttctcttctttgacttccggctgacgtacatcacgtaggtcaacgaaagcttcaagttgttcagccaagatagtggccgcacggcggatcgcctcttcaggatcgatcgtaccattggtttccatctcgatgaccagcttgtccaagtcggtacgctgttctacacgcgctgcttcaacattgtaggcaatacgctctacagggctatagcatgcgtctactaacagacgaccaattgggcgctcatcttcttccgaatgaattcgggcagaagccggcacataaccacgaccgcgctgaactttgatacgcatgctaatagatgcgttttcatcggtcaggtggcagatcacgtgttgcggcttgacgatttcgacatcaccatcatgggtgatatcggctgcagtcacagggccaatgccagacttattcagggtaagaataacttcatcttttccttgaactctcaccgccagccctttcaggttgagcaggatctccaggatatcttcctgtacgccttctttggtgctgtactcatgcagtacaccatcaatctcaacctcggtcaccgcgcaacccggcatagatgaaagcagaatacggcgcagtgcgttgccgagagtatggccaaagccacgctctaacggctcaagggtcaccttggcgtgcgtcgaactgacttgctcgatatctaccaggcgcggttttagaaactctgtcacagaaccctgcattgtgtcctctctttggtactaagctttacttggagtaaagctcgacgatcaggtgttcgttaatgtccgcagacagatcagtacgttcaggaatacgtttgaacacaccttccatcttaacagcatcaacttccagccaagtcggcttttcacgctgctcagccagctccaaagctgccttcacacgagactgctttttagctttctcacggatgctgactacgtcattcggagatacctgataagaagcgatgttaacaacgcgaccatttaccatgatagctttatgactaaccagctgacgtgattcagcacgagttgcgccaaagcccatacggtaaactacgttgtccagacggccttccagcaattgcaacaggtttgcacctgtgttgcctttcagacgtgctgcttctttatagtagttacggaattgacgctccagaacaccatagatacggcgaactttttgtttttcacgtaactgcacaccgtaatcagacagacgcggtttacgcgcaccatgctgaccaggtggttgttcaatcttacacttggtgtcaatcgcgcgaacgccagacttaaggaacaggtctgtgccctcacgacggctcagcttgagcttaggacccaaatatcttgccattttctctctccaacaaacctaaaagcaacgttatacgcggcgctttttcggcggacgacaaccgttatgaggaatcggagtcacatcagtaatattagtgatgcggaaaccagccgcgtttaacgcgcgaatagttgactcacgaccaggaccaggtcctttaaccataacttccaggttcttaataccgtattctttcactgcttctgcgcagcgctctgctgcaacttgcgctgcaaacggagtagatttacgagaaccacggaaaccggaaccaccggctgttgcccaacccaaagcgttaccctgacgatcagtaatggtaacgatggtgttgttgaaagaagcatggatatgagccacaccgtcagagactgtctttcttacacgcttgcgtgcacgaataggtgcctttgccattattcaatcaccccgattatttcttgatcggtttacgcggacccttacgggtacgtgcgttggtcttagtacgctgaccgcgaactggtagaccacgacgatgacgcaaaccacgataagtcccaaggtccatcagacgcttgatgctcagggtcacctcacgacgcagatcaccttctacaacgtacttggcaacttcgtcacgcagcttctcgatttgctcttcagacagctcactgatcttaacattttcagcaatacccgcagcgacacagatagcctgtgaacgggtcttaccgataccgtagatcgcggttaaagcgataacagtatgtttctgatcaggaatgttaatgcctgctatacgggccactatgcactcctactattttatacggcaataccattctgaaaagcccgttttcaggatactcaaatagcattgctgtcacatacaaaagattggctggctaatctagccagctcaacccaactttgcaagaaaaatatgcaagataaatcagccttgacgctgtttatgctttggttcggcactgcagattacgcgaacgacaccgttacgcttaacaattttgcagttacgacataatttcttgacggaagcacgaactttcatttttactctccgtaacttctcaaacatatctgattagcgattatagcctttcagatttgctttcttcaatgcagactcgtactgactcgacatcattagagtttgcacttgagccataaagtccatgatgaccacaactacgattagtagtgaggtaccaccaaagtaaaatggtactttcatcgcgtcacgcatgaactccgggatcaggcagatgaaagtaatatacatcgcaccaattaaggtcagacgcgtcattactttatcgatgtacttcgccgtttgctctcccggacgaattcctggcacgaatgcaccggacttcttcaggttatctgctgtttcacgcgggttaaacaccaacgccgtgtagaagaaacagaagaagatgattgcagacgcatagagtaacacataaagcggctgtcccggctgcaaatacatcgaaatagtcgtcagccagttccaacctgtcccgcccccaaaccatgatgcaatcgtggcagggaacagaattatgctggaagcgaagattgcgggaataaccccagccatattcactttcaacggtaagtgtgtgctctgtgctgcataaacacgacgaccctgttgacgtttcgcatagttaacgacgatacgacgttgaccacgttcaatgaaaacaacgaagaaggttactgcaaacactaatactgcaaccaacagcaacaggaggaagtgcaggtcgccttgccgagcttgctcgatggtatgaccaactgccggcgggagacccgcgacaataccagcaaagattatgattgagataccgttaccgataccgcgttcagtaatctgttcacccagccacatcaggaacatagtcccggtaaccaggctcacaacagcggtaaaatagaaggcaaagcctggatttaataccagaccttgcatcccaggcatattcggcagaccggtagcaataccgatcgactggaatatagccaataccaacgtgccataacgggtgtactggctaatcttacgacggccagcctccccttctttctttatttcagctaacgctggatgaaccaccgtcagcagctggataataattgacgccgaaatatacggcataatacccagggcaaagatcgaagcacgactgagagcaccaccagagaacatgttgaacatttcaatgatggtgcctctctgctgctcgagcaatttggcaagcacagtggcatcgataccaggaatcggaataaaagagccgatacggaaaacaataagcgcaccgataacaaacaaaagtctgcgcttcagttcgcctaatccgcctttagcactttgaaaatctaatcctggttgcttagccatctgctacttattcctcaattttaccgccagcagcttcgatagcagcacgagcgcctttggtgacacgcagaccacgcagagttaccggacgagtgacttcgcctgaaagcataactttcgcgaattcaatctgggtaccaacaacgttagcggctttcagcgtgttcaggtcgattacgtcgccttccactaaagccagttcagacagacgaacttctgccgtgatcattgctttgcgagaggtgaagccgaatttcggcagacgacgatataacggcatctgaccaccttcaaacccacgacgtacgccaccgccagaacgtgagttctgacctttgtgaccacgaccagcggttttacccaggccagaaccgataccacgacctacacgcttaggcgcatgcttggcaccatcagccggagacagagtatttaaacgcatctgttactcctcaactttaaccatgtaggaaaccaagttgaccataccacgcacagcaggagtatcctcacgctctacagtatgaccaatacgacgcagacctaaaccgagtagagttgccttatgctttggcaaacgaccgatgctgctttttgtttgagttactttaatagtctttgccatggttatttccctagaatttcttcgacggacttaccacgcttggcagcgaccatttctggggatttcatatcttccagagctgaaatagttgcacgaaccacgttgatcgggttagtggaaccataggctttggccaatacgttatgaacccctgcaacttccagaacggcgcgcattgcaccaccggcgatgataccggtaccttcggaagctggttgcatgaatacgcgagaacccgtatgagcacctttaacagggtgctgcagagtgccgccatccagagcaacgttaatcatagcgcgacgggctttttccatcgctttttggatcgctgctggaacttcgcgtgctttgccgtagccaaaaccaacgcgaccgttaccatcaccaactactgtcagtgcggtaaagctgaaaatacggccaccttttacggttttagatacgcggtttaccgcgatcagcttttcctgcagttcgccagcttgtttttcgatgtgtgacatcttacacctctaccttagaactgaaggccagcttcacgggcagcatctgccagtgcctggactcgaccatgatattggaaaccggaacggtcaaaggatactttagtaatccctttttccaatgcgcgctcagcaatagatttgcctacagctgctgcggcatctttgttgccggagtacttcaattgctcattgatagctttttctaaagtagaagctgctaccaaaatttcagaaccgtttggtgcaataacctgcgcgtaaatatggcgtggggtacgatgtaccaccaggcgagtcgcacccagttctttgagcttgcggcgtgcgcgggtcgcacgacggatacgagctgctttcttatccatagtgttaccttacttcttcttagcctctttggtacgcacgacttcgtcggcgtaacggacacccttgcctttataaggctcaggacgacggtaggcacgcaaatctgccgcaacctgaccaatcacctgcttatctgcgcctttcagcacgatttcagtttgggtcgggcactctgcagtgatgccagccggcaattcatggtcaactggatgagagaagcctaaggccaaattcaccacattgcctttaactgcggcacggtaacctacgcctaccagttgaagctttttagtgaagccgtcggtaacaccaataaccattgagttcagcagtgcacgagtggtacccgcttgggcccaaccgtctacagcgccttcgcgtggagcgaaagtcagtgtattttcttcttgcttaacaacaacggagctatggatggtacgagtcagctcgccgtttttaccctttatcgaaataacctgaccgttgagttttacctctacgccggcaggaatgacgacgggtgcttttgcaacacgagacattctttcctcccgaattaagctacgtagcagataatctcgccaccaagaccagcctggcgagctgcacgatcggtcataacacctttagaggtagaaataacagcgatacccaaaccggccataacttttggcagctcatcttttttcttatagatgcgcagacctggacggctgatacgttgaatgctttctaccactgccttgccctggaagtacttaagtactaagaccagttcaggcttggtgtcgccttcgattttaaaatcttcaataaaaccttcttctttcagaaccttggcaattgccagtttcagtttggaagaaggcatggtgaccgctactttgttcgcggcttgaccgttacggatacgggtcagcatatccgcgatcggatcttgcatgctcatctgtatttactcccgtgattcaattggtgaaattaccagctagcctttttaaggcccgggatttcaccgcgcattgcggtttcacggactttaatacggctcaacccgaacttccgcaggaaaccatgcggacgaccagtttggttgcagcggttacgctgacgggacgggctggaatcacgcggcagagactgcagcttcagaacagcatcccaacgttcttcatcggatgagttcacaccagagataatagcttttaattcctcgcgtttagcgcggtatttgttagctagtttcacgcgaacgacttcgcgtgctttcattgattgcttagccatcagtaaccctaccttacttgcggaatgggaagttaaaagcagccaacaatgcacggccttcatcatcggatttcgcagtagtggtaatggtaatatccaaaccacgcacgcgatcgactttatcgtagtcgacttccgggaagatgatctgctcgcgcacgcccatgctgtagttaccacggccatcgaatgacttagcggacaagccacggaagtcacggatacgtggaacagcaatggagatcagtcgctctaagaattcccacatgcgttcgccacgcagggttactttacagccgatcggatagccctgacggattttgaagcctgcaacagatttgcgggctttggtgatcaacggtttttgaccggagattgctgtcaagtcagctgctgcgttatccagcagtttcttgtcagcgatcgcttcaccaacacccatgttcagggtgatcttctcgacccgagggacttgcatgacagagttgtagccaaactgagacatcagttgtttgaccacctcgtctttgtagtaatcatgcagtttcgccatcgtattactccaaattacttgatagtttcgctattagacttgaagaagcgtacttttttgccgtcttcgaatctaaagcctacacggtcagccttaccggttgtcgcgttgaacagcgcaatgttagaaacctgaatagcagcttctttttcaacaatgccgcctggttggttcagggccggaaccggcttctgatgttttttaaccaggttgataccttcaacaatgaccttaccagcagacaggacattctttactttaccgcgcttacctttgtctttcccggttagcacgataacttcgtcatcacgacggattttcgctgccatggttcgctccttagagtacttctggtgccagagagataattttcatgaacttctcattacgcagttcacgagttaccggcccaaaaatacgcgtgccgattggctgctcgctgttattatttaaaataacgcaagaattgccatcgaagcgaatgacagaaccgtccgggcgacgtacacccttcttggtgcgcaccactaccgccttcagcacatcgcctttcttcaccttgccacgaggaattgcttccttaatggtgatcttgatgatgtcgccgatgcctgcgtagcgacggtgcgagccacctagaaccttgatacacattacgcgacgtgcaccggagttgtcggccacgttcagcatagtctgttcttggatcatgttagtgctccgctaatgtcaactactactttaggacccagaataggtcgtttaaaagccccactaatgagggcgcggcattataacaccggttccaaattatgggtagaaaaaataaacggctcactttctgagccgtttattctatgcgagttggctactctattacagaatcgctttctctacaacgcgaacaagggtccaagacttagtctttgacaatggacggcattcgcggatttctaccacgtcaccgattccacattcattgttctcgtcatgtacatgcaatttcgtcgtacgacggatgaatttcccataaatagggtgtttcaccacacgttcgatagcaacaaccatggatttctccattttgtcactaactacgcgaccttgcagagtacgagtttggtcagtcattacgcacccgccttttcagtcagtaaagtcttaacacgtgcgatattacgacgcacttgtttcgacaggtgagtttgttgcagctggccactagccgcctgcatgcgcaaattaaattgctcacgcagcaggttgagcagctcagtgttcagctcttcaacgcttttttcacgcagctcttgtgctttcattacatcaccgtcttagttacaaaggtggttccgacaggcagttttgctgccgcgagcttgaatgcttcgcgagcagtttcttccggcacaccagccatttcaaacaacatttttcctggctggatcagggcaacccaatactctacgttacccttacctttacccatacgcacttcgagcggcttctcagtgatcggtttgtccgggaatacacggatccagaccttaccttgacgcttaattgcacgtgtcatcgcacgacgggctgcttcgatttgacgagccgtcaggcggcaacggccacaagctttcaggccgaactcaccgaagctaacatccgtaccctgcgccaggccacggttacggcctttgtgcatcttacggaattttgtacgctttggttgtaacatcagcgattctccttacttgcggcctttacgctgctgctttttaggttgagcagccggttccggttgttcaacagcagccataccacccaagatctcacctttgaagatccataccttaacgccgattacaccataagtggtgtgcgcttcagatgtgttgtaatcgatatccgcacgcagagtatgcaacggaacacgaccttcacggtaccattcggtacgcgcgatttcagcaccgccaaggcggccgcttacttcaactttgatacctttagcgccaagacgcattgcgttctgtacagcacgcttcatagcacgacggaacataacgcgacgttccagctgtgaagtgatgctgtcagcaaccaattttgcgtccagttccggtttacggacttcggcgatgttaatctgcgcaggaacgccagcgatatccgctacgaccttacgcagtttttcgacatcttcacctttcttgccgataacgatgccagggcgagcagtgtgaatagtcacacggatactcttcgctggacgttcgataacgatgcgagaaacggaagctttcaccagttccttagtcaggaattggcgaactttaaagtcgctgtccaggttgtcagcgaattctttggtattcgcataccaagtagagttccaaggtttgacaatacccaggcgaataccgttaggatgtactttctgacccattgctagtctccagagtctcagcgatcggacacaaccacagtaatgtggctggtgcgcttcaggatgcgatctgcacgaccttttgcacgaggcataatgcgcttcatgcttgggccttcgtctacgaagatcttcgtgactttcagatcatcgatgtcagcgccatcgttgtgttctgcgttagcaatggcagactccagtaccttcttaaccaaaccagcagctttcttgttggtataggccagagtttccagagcttgcgacactttcttaccgcgaatcaggtccgctaccaagcgaaccttctgagcagaagaacgagcgtggcgatgtttagcgatagtttccatctcttcctcctaccttagcgctttttagcctttttatcggccgcatggccgcgataagtacgggtcggcgcgaattcacccaatttgtgaccgaccatttcatcggaaacaaagacaggaacgtgctgacgaccattatggacagcgatggtcaaaccgatcatatttggaaagaccgttgaacgacgggaccaagtccgaataggcttcttgtctccgctttccaccgctttctctaccttcttcagcaagtgcaggtcaatgaagggacctttcttgagagaacgtggcatggcttatcctctaattattttttactacggcgacgtacgatgaacttatcagtacgcttgttgctacgggtcttcttacctttggtttgaacgccccacggggttaccgggtgcttaccaaagttacgaccttcaccaccaccgtgtgggtgatctaccgggttcatcgcagtaccgcgaacggtagggcgaataccacgccaacgacttgcacctgctttacccagcacacgcagcatgtgttcagcgttaccgacttcacctaaggtggcgcggcaatcagcttgaaccttgcgcatttcgccggagcgcagacgcagagtaacgtaggaaccgtcacgagcaacgatctgaacgtatgcaccagcagaacgagccatctggccgcctttacctggtttcatctctacgttatgaaccgttgaaccaactgggatgttgcgcataggcagggtgttacctgtcttgattgcagcatcaacgccagattggatctggtcaccagctttcaggccttttggcgccaggatgtaacggcgttcgccgtctttgtacagaaccagcgcgatgttcgcggaacggttcggatcgtattccagacgctcaaccactgcagggataccatctttgttgcgtttgaagtcaaccagacgataatgctgcttgtggccaccaccgatatgacgggtggtgatacggccattgttgttacgaccaccgcttttgcttaatttctcaagcagcggggcataaggtttacccttgtgcagctcagggttaaccactttaacaacgtggcgacgacccggagatgtaggtttacatttaacaattgccattgtttactcctccgacttactctgcgccgccgatgaagtccagattctggccttctttcagggtgacgtaagcttttttccagtcgctacgacgaccaacacgctgaccgtgacgcttactcttgcctttaaccagcaaggtgttaacgtcttcaacttcgacttcaaacagtttctgcactgcagctttaatttctgctttggtcgcgtcgatggcaactttgagaacgatggtgttacttttttccatcgcagcggacgctttttcagatacatgcggcgcgcgcagtactttcagcagacgttcttcacgaatcatgccagcatctcctcaacttgcttcacagcatcagcagtcataaccactttgtcgaaggcgatcaggctaactggatcgatacctgctacatcgcgaacatcaaccttgtacaggttgcgagctgccaagaacaagttctcgtcaacttcaccagttacgatcagcacatcttccagagccatatctttcagtttctgtgccagcagcttagttttaggcgcttctacagagaacttctcgacaatgatcagacgatcttgacgtaccaattcggacaggatgcttttcagcgcgccgcggtacatctttttgtttactttctgactgtggtcctgaggcttcgcagcaaaggtcacaccacctgaacgccagatcgggctctttacagaacctgcgcgtgcacggccggtacctttctggcgccacggttttttaccggaaccagtcacttcagcgcgggtcttctgagcgcgagtaccttgacgggcacctgctgcataagcaacaacaacctgatgtaccagcgcttcgttgaaatcacgaccgaaggtagtttcggaaacagtcagcgcgccttgcgcgtctttcaatactaattccattgctatccccttacgccttcacagctggtttaacgatcaggttgccaccggttgcgcccggtacagcacccttaaccagcagcaggttgcgctcagcgtcaacacgtactacgtccaggctttgaacggttacacgctcgtcacccaggtggccagccattttcttgcctttgaacactttgcccggagtctggttctgaccgatagaacccggaacgcggtgagacaaggagttaccatgggtagcatcttgggtacggaagttccagcgcttaacagtaccggcaaaacctttacctttagatgtacctgtaacatcgactttcttaacgtctgcgaaaatttcaacgctaatttcttgaccagcagtgaattcttgaccttctgcaaggcggaattcccacaggccacggccagcttctacgccagctttagcgaagtgacccgcttccggtttggtaacgcggttagcttttttagcaccggtagttacttgaacggcacggtaaccgtcgttctccaggtctttgacctgagttacgcggtttgcttcaatttcgataacggttactgggattgaaacgccatcttcagtgaagatacgagtcatgcccacttttttaccgactaaaccaatcattgtttcaacctctcaatcgctcaatgacctgattaacccaggctgatctgcacgtctacaccggcagccagatccagacgcatcagagcatcaacggttttctcggttggctcaacgatgtcaaccagacgcttgtgagtgcggatttcgtactgatcgcgcgcatctttattgacgtgcggagaaaccagaacggtaaagcgctctttgcgggtcggcagcgggatcggaccggtgacctgcgcaccagtgcgcttggcagtctcgacgatttccgcagttgattgatcgatcaaacgatgatcaaacgctttcaggcggatacggattctttggttctgcatgagaccagagctccaattatttataaacataaatgattactactcagacccatttcgattgatgggagagtgtaatcgttcaacatataacccccaaatcgggagtattgttcggaagtatcatttagctactcccgacagatcaaattcaatctgaccaaccaagattaggtaggcacgcgcattatacgtaaattcgggcagtaagcaagtcactgttgaaaatctatgcgagaacttacgtatttagccattcatctcaagttttagtgaatttacttattatcacactacgttactataggtgagtaacaaatattgaccaatacagggagagggagagttggtcatccatatattcgcaaaagggactatgccatggctcataattgccggagtattctactacttgttatcgtatgtttcatgactcaagcaatagcgagtacgcgctcgatttttcccctgcaggcctacaaccaaagccctacctattggtttccacccaacgcccccgattatactaaacccttagtttccgccaaacttcagcagcaagctcatcaaaacctactcaaacactatttcggcggcagccctacctcttcttcgccttgggatgagcactatgttcagcaaaagctatcggataaaggaacggatagtatcgcttcttctataaagaaagtattagagcgctttgacaatgtagatgccaagggagatagcattaattacggcagtaattatcgtccctatacacaaacatggattgatagcattcgtaccaatgtgccgctaactcagttcaagaagctacattttcacgctgcacagagaggaataaccgtaagtcaaacgatggttagagtgctccctaccaatgatcctagcttttatagcgatgctatcgcgggtgaaggttaccctttcgataacctgcaagaatcgcggctacacattggaacgcccatttatgtcattgggcatagtgccgatactctgtggagtttcattatgagcccagacttacagggatgggtgctgtctaattctattgcctatgccgatgaggcttttatccaactatggcgaagtgcggcaaaaaaaaagatggcggtaataaccgacttcaacgtagcgttgactgagccacatcaatctcgtatttatgccagtgatgacatggggagcattctcccacagcttgacgcccaacacctgatgattccggtggttaacaatcggcaacaagctgttatacatatcgccagagtagcgcccgacaaaataagtaccctaccgctcgctgcaagccgtaagaattttgcgttactgattcagcgttcactaggtcgcccttacggatggggaggcttgtacggctacaacgattgttcgagcgaattaaaaaatctgatgaccgcattcgggttttggctccccactcactcttcaaaacaaatcactcagggaaaaaccgttgatttaagccaatatccgccaaacgagcgcctagactttctggctaagcatggtcggccttttatgaccctcattcatattcggggacatattatgctgtacgtaggaaacactgatgaagaacggccgatgacctttcaaaacatatggggcttagggccgaaagatcgtagcaggagatctattattgggcaggcagttctgttccctctattgctttcttatccagaagatcgctctctggcatctttggcggcaggccctatatttcagatcagttatctcgaccagcctagctatatcgataaatcttagtgcacagtgtatatagtgctggtaagtaagtactgcgccaccctcaattgaatagacaaaaagtgagcaccgttgagatactcacttttttgttatcccagcattgtggcacaacagcttagttaagcttccctagctgcgcctgagagtagttctgtatacctaaacgttctatcaggctcagttcagtttccagccaatcaatatgttcttcttcatcggtcagaatttctttaagcagatcgcgagtaacataatcatgtatcgaatcagcataagcgatgccttcacgtaaatctttggcgccgcttaattcaagagccagatccgacctgagcatctcctcgacgtcttcgccaatattgattttgcctaaatcctgtagattaggaataccctcgagaaacagaatccgctcaatgtaacgatctgcatgtttcatttcatcgatggattcgtggtattccttatcattcagacggataagtccccagtttttaaacattcgcgcatgcaggaagtattgattgatagcaaccagctcgtttccgagtagtttattgagatgagaaattatttttttatcgcctttcatagataagccctccgcttccagtactaaaagtgtagtaccagatggcaaagagtggggaatcttatcccacctatgttttaagcaacgtcattcatttctggaatattcgcacactcctcgatcaaaatttctctcgcctgccggatacattttccgcaatcagttccgattggaaccagttggcgtagttgcttcaaagtatggggatgatgctggcgaacagcattgcggatgactttatcagacactccattacacaaacatacgtacatataaggctcacttcttaaccaatgccgtaagtgtaaatgggaatgctttttatttcaattaagattattttcttttgatataaaaaagggcgccggagcgcccttctaacttaatcagtaaagaaattaagagattactttagcaacaacaccagcgcctacagtacggccgccttcacggattgcgaaacgcagaccgtcatccatcgcgattgggtggatcaaggtaactttcatgttgatgttgtcacctggcattaccatctcaacgccttctggcagttcgatagtaccggtcacgtcagttgtacggaagtagaactgtggacggtagcctttgaagaacggagtatgacggccgccttcgtctttgctcagaatataaacttctgaatcaaaggtagtgtgtggtttgatagaacctggtttagccagaacctgaccacgttcgatatcttcacgcttaataccacgcagcagaacaccaacgttctcaccagcacggccttcgtccagcaatttgcggaacatttcaacgccagtacaagtagatttaacagtatctttgataccaacgatctctacttcttcaccaactttaacgataccgcgctctacacgaccagttacaacagtaccacggccggagatggagaatacgtcttcgataggcagcaggaacggcttgtcgatagcacgttctggttctgggatgtaagaatccaggaagccagccagttcgatgattttagcttcccactcaggagcgccttccagtgctttcagcgctgaaccgcgaactactgggatatcgtcgcctgggaaatcgtaagtagacagaagttcacgaacttccatttctaccagttccagcagctcttcgtcgtcaaccatgtcgcatttgttcatgaatacgatcatgtaaggaacgccaacctggcgacccaacaggatgtgctcacgagtctgtggcatagggccatcagttgcagcaacaaccaggatagcgccatccatctgcgcagcaccggtgatcatgtttttaacgtagtcggcgtgacctgggcagtcaacgtgcgcgtagtggcgagtcggggtgtcatattcaacgtgagaagtgttgatggtgataccacgagctttttcttctggcgcgttatcgatctgatcgaatgcacgagcgttaccgccgtaggttttagccaatacggaagtgattgcagcagtcagggtagttttaccatggtcaacgtggccgatagtaccgacgtttacatggggtttggtacgttcaaatttttctttagacacgactatattccttactcttgtgctctcccacttatgagagagcactggatcattgttttaaacccgaaagcttatttgccacgggcttcgataacggctttagcgacgttgctaggtgcttcagcatactccaggaattccatggagtaagaagcacggccctgagtctgagaacgcaggtcagtagcataaccgaacatttcagacaacggaaccttgacgcgaacggttttaccggtagcagtatcttccataccttcgatgataccgcgacgacggttaaggtcgcccattacgtcacccatgtaatcttctggggtttcgacttcaaccttcatgattggctcaagcagaactggtttagctcgtttgaaaccttctttaaaggcgatagaaccggctaatttaaacgccaattctgaggagtcaacgtcatggtaagaaccgtaatgcagacgaatcttaacgtcaacaaccggataacctgccaatggaccagctttcagctgttcctggatacctttatcaacggctgggatgaactctttaggaatagaaccaccaacgatttcgttgacgaattcataacctacgccacccggtggcagcggagacatgtcgataacaacatgaccgtactgaccacgaccgcctgattgtttagcgtgcttaccttccacgtccttaacggtgtcgcggatggtttcacggtaagcaacctgaggtttaccgacgtttgcttccacgttaaactcgcggcgcatacggtcaaccaggatatccaagtgcagctcacccataccagcgatgatagtctgaccagattcttcgtcagtccaaacgcggaatgatggatcttcttttgccaagcgacccagagccatacccattttttcctggtcggctttggtttttggttcaacagcaacagagattactggctctgggaactccatacgttccaagatgataggattagctgggtcacacagggtgtcaccagtagtcacatctttcagaccgatcgctgctgcgatgtcgcctgcgcgaacttctttgatctcttcacgtttgttggcgtgcatctgtacgatacgacccagacgctcacgctgtgaacgcactgagttcaacacggtgtcgccggagtttacaacgccagagtacacgcggaagaaggtcaagttaccaacaaacgggtcggtagcaattttgaacgccagtgcagagaatggctcgttgtcagatgaatgacgaacagccggggtatctttaccatcgtccagaataccgttgatagcttcaacgtcagttggagccggcaggtattcgataaccgcatccagcatcgcctgtacgcctttgtttttaaacgcagaaccacaggttaccagaataatttcgttgttcagaacgcgttgacgcagagctttcttgacttcagcctcggtcagctcttcgccgcccaagtatttgtccatcagctcatctgaagcttcagctgcagattcaaccaggttctggtgccattctttagccagctcaaccatgtcagcagggatatcttcgtattcgaaggtaacgccctgatctgcatcgttccagttgatggctttcattttcaccagatcgataacgccggtgaatttctcttctgcgccgattgccagttgcaatggaactggattcgcgcccagacgagatttgatctgaccaacaactttcaggaagttagcacccatacggtccattttgttaacgaacgcgatgcgtggaactttatatttgttagcctgacgccatacggtttcagactgcggctgaacaccaccaacagcacagtaaaccattacagcaccatcaagaacacgcatggaacgttctacttcgatggtgaagtcaacgtgtcctggggtgtcaatgatgttgacgcggtgtggctcaaactgcttagccataccagaccagaaggccgtggttgcagcagaagtgatggtaataccacgttcctgctcctgttccatccagtccatggtggctgcgccgtcatgaacttcaccgattttatgatttacgccggtgtagaacagaatacgttcggtagtggtggttttaccggcgtcgatgtgagcactgataccgatattacgatagcgctcaatgggtgttgtacgagccatttgattcctctattcctagggcgttcaagttcagttaacccatgcgggttggctaattgaagcgcccgcatggttagcattactactgcgtggtaattaccagcggtagtgggcgaacgccttgttggcttctgccatgcggtgaacgtcttcacgtttcttaacagcagaacctttgttctctgctgcgtcagacagttcattcgccaagcgcagagccatggatttatcaccgcgtttacgagcagcatcaacgatccaacgcattgccagggcattacgacgaaccggacgaacttctactggtacctggtaggttgaaccaccaacgcggcgagacttaacttctacagtcgggcgcacgttatcaagagcagtttcaaacgcttccaggtagtctttaccagaacgctgagccagggtttccagcgcggtatagacgattgcttctgcagtagattttttaccatctaccatcaggatgtttacaaatttggccagtaactcagatccgaacttaggatctggcaagattttacgttgaccaataacacgacgacgtggcatggaaatactccgttgttaattcagggttgtccaaaactctaagagtttattttgacattaaagtgaaaatgtttggccttacttaacggagaaccattaagcctttggcttcttcacgccgtacttagaacgagcttgcttacggtctttaacacctgagcagtcaagcgcgccgcgaacggtgtggtaacgcacacctggcaagtctttaacacgaccgccacggatcaggatcacggagtgttcctgaaggttatgaccttcaccgccgatgtaggaggtgacttcaaaaccgttagtcaaacgcacacggcaaactttacgcagtgcggagtttggttttttcggggtggtggtatatacgcgggtacatacaccacgtttctgcgggcaggcttccagtgcaggaacgttgctcttagcaaccttcatgctacgtggcttgcgaaccagctggttaatcgttgccattattaaaaaagctcctgggtttttgcttcgtaaacacgtgataaatccccctcgtatgcactaagggcagagtacgaggacgcagaattttatggctgactacctaaggtgtcaagaaatatacagcattagtcgtattaccatgccaagtgttgacgatgtttagtggttaaatcgacgaagtgagtatagccgatcgctagtattttgtctgaattttgaccaaccaaaccacgcgcagccagatcattttccagaacatagagagaagctaagttatttaacaatatgttaagaacatcggcgtcttttaacgtcgctagcactccatcctgcaaaaacagaatggcatcttcgtcggtggtcagtctcagcagcgcggataaatcgcattgaaaaggtgaacggctgaaggtatacaacatatttagtatcctgatacggtcaaaatgtcagcacaacgtcgtaagcggctaactgttggcgtaacttttcaggcgctaacacttcaacatccaacacccaatctttggcctgagccagaccgcgttgccgtaatgcctctgcgcacatataacacttttctacgtcataaagtggtaagacaccgaaagtggcaatatagtttctggccagaattttttccggctgttgttgcggaagtaactggaatacgccatccgagacaaaaaacacgccgatatcttcgctgagagccgaagccgccaatagcgcgtctagtccttcccggccactcgcgtttccgtgtgggccttgagtgaaaacaaaagcgatagatttcatgcccatctctaaaattgcgcgatcaaaattgaacaacgcggtcacaggtcagcgccgcttcggccagcgaacccaatccgctcagagtaaaaccgggctgtagattggcggcggccagatcaagctgctccgcctcatgccgatcgcagattcctcgccgcaacgccgcggccacacacacattgagctcaatcccattctgctgcgccagttgttgccacgcgcgaaccagatcaaactcatcgctggcaggcgaagtcagttgattggcgttcagcaccccttcccgatagaaaaaaatgctgaccaattgatggcccgccgccagtaacgcctgagcaaactgataagcactgctggcctgctgagtaccataggcagggccggtaaccaataggcagtaacgcagcattagcgctcgtgcccgataagatcgccgcttttgaactggcgaatatacagataaaccgtatgcttcgagatattcaaccgctccgccacttggttaatggcatctttaatatcaaaaatacccttctcataaagattgagcaccacctggcgatttttcgcattgttagacacattgcgatccgcattcacctcttcaatggtgaattccagcgtttgcgccaccagatcatccaccgatgacgcaaagttgacggaagaaggaacttcctgcgtttccggtggcataaatgtctgaataatttgtgagaaaggcacatccagattcatgttgatacacagcaagccaatcactcgctgaacgcgattacgaatagcaatagtgacggatttcatcaatacgccgctttttgcgcgagtgaaataggcgcgagagacgctactgtccgcaccggccatatcgtgcagcatacgcagcgccagatcggttatcggcgaaccaatctgacggccagtatgttcaccgttggcaattctgacggctgaacacttaagatcttccagcgaatgcagaacaatttcacaatgtccgccaatcaacatggccaagccatcaacgacggcctcgtatgatttcagtatttcataatctgtttgactgaacggacgttcatccagtaaatccagttcactggtttcgccagttaaaagcgaattagacatcgaagacaccaccctctaggtagagcctgtctcaatagcaacgggcagactcataactcaatatcttggaatataagcttagcaaatatgccaaagctaaatccttgcgtttgtgcgtggtattgacgttaagcccacaacccataagcgtcaagttatccaagagcagaagcgcaaaatgaatcagcagaatacaaaaaaaaaccgccgcgaaagcaattcgcaacggtctgtgctgttcgccaaagcgatactaagctatttccgaattatttttgggcttttgcttcagcttctgcggcggttttttcagcagcgacgtcggctttaggagcagctttcacatccagcaattccacgtcgaataccagagtggagttagcggggatccccggaacgccggttttaccgtaagccagttctggtgggatgaccagagtgattttgccgcctttcttgatttgtttcagaccttcagtccagcctggaataacgccgtccagacggaaagacagtggctcgccgcgtttgtatgaatcatcaaagacggtgccgtcagtcaaagtacctttatagttaactactacggtatcactgtctttcagcgcgtcaccagcacctggtttttcaactttatacagcaggccgctcgcggttttcttcacgcctttttctttagcaaaagtatcgcggtacttggtgcctttatctgaattttctttcgcatcttgcgccatcttggcctgagccgaggatttcacacgagcttcaaaaccttgcagagttttttcaatttcttcgtcagtcagcttagatttattggcaaaagcgtcctgaacaccggcgatcaactggtctttatccagtttgattcccagtttttcttgttctttcagcgagttgtccatataacgacctaaggatgcacccagtgcatatgcagattgctggtcgtcatttttgaacttgctgttagtcgttgctgccgcgtcaggagtttttaccgcgtcagcagccatagcctgagttgcattcagggtcaatgccatggttgtagccagcaaggttactttaaacaatgatttcatccatttctccaatggctcagggcttcttaccccaagcaacgattgtgtatgtttcagtactataactgccggagcgaagacaaaacaatctccgaatctacagtatgcagtgatatttcgactttttttatcacaagaagtttcctttttattgttctcactctctgcgcaaggcattccgcggcgtttacaggtagaatctctgacatcgctgtcgctccggcatgcggccatcgcggcaggaatcgatgacagaatcgtcgttagcagttatgagaggaaatactatggaagcgtctttgttcgaacaacggcttgaaatgctggaaagtcgtctggcgtttcaggaagtgacaattgaagaattgaatttgattgtgactgaacaccagatggaaatgaccaaactgcgggaacacctgcgtttgctgacggataaattacgggcctcccagccttcaatgttggcatcacaggcagacgaaacgcccccacctcactattgaggtttatttgcggcacaaaaaagccagccttgcggctggctttttcattgacgatcgtgatgccttagtggcaaccacagccgcctttaccgcaaccgccgccctgttgagcgtggtcatggccgtggtcatggtcgtgatcgtggtcgtgaccgccgcagcagccgccgccgtgttcatggtgatgatcgtgctcaccgtgtacgtggccgtgttgcagttcttctgcagtcgcttcgcgaatggcaacaacttcaacgttgaagttcagatcctgaccagccagcatatggttaccatcaaccacaacgtgctcgtcttccactgcggtaatttctaccggtactggaccctgatcggtgtcagccaggaagcgcataccgacttccaactcgtcaacacccataaatacgtctttcggtacgcgctgaaccagattttcatcatagttgccgtaaccgtcatcagcacttacacgcacatcaaaacggtcgcccgcttcgtggccttccaacgctttttccaaaccggaaatcagggagccgtgtccgtgcaggtagtccaacggcgcactcaccggagactcatcaactaacacaccgtcttctgtacgtacctggtaagccaggctgaccactaggtcttttgctactttcatgacatctcctacccttggaacaaaaattggcacagattgtagcggaaatctgaacccctgtacccttcagcataaaaaatcgctgaggataacgctactttggatcaaaaataccgataacttgctctttcgggcggacatgctgattgacctgctcgtcagtttgacgctgatgatggccacacttcacacattccacgacttccacctgatcttcacgccataaagcgagagtatccatagccttacactgcgggcaggtagcgccggcaataaaacgtttacgggttacagacatgctgatttctccggtttactcgtgttcatcccagccatcaagctgcctgctttcatgcagcatttctcgttggaaaatatcttccagctcgcgacgggcctctttgactctggaaatctgcgccacatcgccatggtgcggcggcatcagctcacgcagcatacgcatatccaaacgacggaaatgctgctgcgcccgataagcctgatgcgggtgcatacccagttgtcgtaatgttttacgccccagttccagcgcactggagaaagtttcgcgggtaaaatccttcacgccgctttgcaataattcatgtgcttccacgcggcctctggcgcgggccagaatatgtaaattggggaagtgttgctgacataaatgcaccaatgtcatggtgtcttccggctcattacaggtaatcactatggctttggctttctccgcgccggcggcacgcagcagttctagttcggttgcatcgccataataaaccttataaccgtatttgcgcatcacgcctacggcgctaacgtcccgttccaatacggtaatacgcattttgtttgccatcagcagacggccaataacctgcccgaagcgcccaaaacctacaacgataacctgcggatcgttgtcttccacgaaaggtttttcgtcgctttcttccggagcgttataacggcgagacagaatacgatcgataccttgcatcaataacggtgtagtcatcattgataaagtcacgaccaccagcagcagcgcgagttgatcgacacttaatacatgctgactaaaagccgcagagaatagtacgaaggcaaactcaccgccctgactcagcacaccggcaaactgaagccgcactgaacgcctcaggccaaaggctctggccaacccataaagtaccgtggctttgatggaaaccagcgccaatacgccaagtaatacttccagcagatgggtaaagataacgccaatattcagcgccatccccactgagataaagaacaggccgagcaataagcctttaaaaggctcaatagcgatttccagttcatgctgaaattcactttccgccaacaggattccggcgataaatgtccctaacgccatcgacaggcccagcgcatccataaatattgccgaacctagcacgaccagaagcgcggcggcggtaaacacctcacgcacgccggaggcaacaatataacgaaataacgggcgtagcaggtatcgccctccgatgagcatgccagcaaaagcggccactttcagagcgattctcgcccaatcgttagcgcccccaccgccgcccgccaaaatgggaatcagcgccaatgcgggaataacagccatatcctgaaataacaatacggagaaaccaagttggccgccttcgttacggttcatccctttttcacgcataagctgaagtgccattgcggttgaggacatggctaaaccgatgccaccaatgaccgcggcctgccaggcaaactgagtgaaatagagcagcgcgcccaaaaccgtcgcggtgatgatcacctgccccgctccgacgccaaaaatagagcgcctcaattgccagagtttggctggattaagttccagaccaatgatgaacatcaggaaaacaacgcctagctcagaaaaatgcagaatctcatccacatcgcgaataaaacccagcccccacgggccaatggcgataccggcaatcaggtatcccaataccgctccaatacccaatcgttgtgcgataggtaccgcaacgacagctgcaaacaaaaacagtaaaattgcggttaatagcgccgagccttccataattatggcctcccttgtggcaacggagaagctaaccactcggcgtaggcctgcgcatggttggacaacacttccggcttttgccgacgcgcccagtaaacaatcatcggatttatccaatgcatatgacacatagacgcagtcaattcgaacgggcgcagaatgtcatccatcggatattggttatagccgccgactcgatatgtcccttccggttcgccggtggtaatcaccgaacgccagtattttccccgcagagcatggcctccgacgccattggcaaacccgcgcgccagtacgcgatccagccattcctttaataaggccgggcaactataggtataaagcggatgttggaagacaatgacctgatgctcacgcagtagctgttgctcgtgatgaacatcaataaagaaatccggataatgtgcgtaaagatcgtgcacagtgacatgcgctagctgctttaccggttgcagtaaaacccgattggcgaccgagtcctgtgattccggatgggcatacagcagcaaaaccttcggcggctgtgacatcattcccctccaaagcgtcgtcagggtgcgggttttccgttaccatgcgtcgcaagacttaaaatagggcgtttaacgccctgtttgtacccaaagtagaagtagtgggtattgcagattaggctagaaactaatgcctctgcgacctcaggtactaagggttaccttaatataatgacaatttaacatactctaaacatacggcactctatgattgttttctcttcgcttcaaattcgacgcgggactcgcgtcttgctggacaatgctacagcgaccgtcaatccgggccagaaggtcgggctggtaggtaaaaacggctgtggcaaatcgaccctgctggccttgctgaaaggcgaaatgagcgccgatgggggcaacgccactttccccaataactgggcgctggcctgggttaatcaggaaaccccggcgctagatatgccagcgatagagtatgttatcgacggcgaccgtgaatttcgtcagttggaatccgaattacaggccgccaacgaaaaaaacgacggtcatgctattgctacggtacatgggaaactcgatgccattcaggcctggaccattcagtctcgcgcagccagtctgctaaatggcttaggcttttcgcaggatcagttgcagcagcccgttcattctttctctggcggctggcgaatgcgccttaatctggcacaggctctggtatgtcgttctgatttgctgctgctggatgaaccgaccaaccatttggatttggacgccgtaatctggctggaaaaatggctgaaaagctattcaggtacgctaatcctgatttcccacgatcgggatttcctcgatcctattatcgataagattctgcatattgaacagcagtcgctaaatgaatataccggcaactattcatctttcgaacgccagcgtgcgaccaagctcgctcagcagcaatcgatgtatcaacaccagcaggaaaaagtcgcgcatctgcaacactatattgaccgtttccgcgctcaggcgaccaaagccaagcaggcacaaagccgaattaaaatgctcgaacgcatggaaatgattgcgccagcgcacgttgataacccgttccgctttagctttcgcacgccggaaagcctgcccgatccgctattgcgaatggagaaagtcagcgccggctacggcgataaaaccattctgcaatctattaagttaaatctggttcccggctcccgtatcggtctgctcggacgcaacggggcaggtaaatctacgctaatcaaattgctggctggcacgctggaaccacaaagcggtgagatcggtttgtcgaaaggcatcaaactaggttacttcgctcagcatcagttggaattcttacgtgcggatgaatccccgctccagcatatgagccgtttggcgccgaaagagccggaacagcaactgcgggattatctgggcggctacggtttccagggtgatcaagtcacagatccgaccgctcgattctccggtggagagaaagcgcgtctggtattggcgctgattatctggcagcgccctaacctattgctgctggatgaaccgaccaaccatctggatttagatatgcggcaggcactcaccgaggcgctaattgattttgaaggcgcattggtcgttgtttcccacgatcgtcacttattgcgttctacaactgacgatttgtatctggttcacgacggcaaagtcgagcaatttgacggcgatctggaggattatcagcagtggctggtcgatttacagcgtcagcagtcacagcaaggtagcccggaaaaagaagtctctggaaatagcgcccagcagcgtaaagaccaaaaacgccgcgacgctgagttccgcacgcaaacccagccactgcgtaagcaaatcatgacgctggaaaaacaaatggataagttgagcgccgaactagccgccgtggaagatgaattggcagattctgcgctgtacgatatctcccgcaagagcgagctaaccgaatgtttgcagcggcaaaatcaggtgaaatccaaactggaagaaaccgaaatgaattggctggatgcccaggagcaattagagcatctgactaaggaatttgaagaaaattaagcgtttccaagctgaaaactgccgctattcatggatgatcgcggcatggaaaaaattgatatcagcattattgtgccggtgttcaacggcgaagcctatcttgccacgctgcttgattcattgagcagtcagtcaggcgtatctttcgaaatcatcgctatcaatgatggctccagcgacggcagcgccgccatactcacggatcgcgcccgccgtcactcttttctgcgcgtcatacatcaacccaatcaaggtttatccattgcccgtaatcagggcattgctcaggcaaaagggcaatgggtcgcatttgccgattgcgatgactggctagcgccgaacgcactgcaaatctggctacaacaggccacagaacagcagttggatctactgattggcaacggctatcgtttctgcggcgaacccactcagcagagcgtcaaacctttattacccgaacaacgctggcaaaagacgctcaccggaaaacaatggattatccacagcgtcgcacaaaacaactggctgcatttttgctggctacaactgatccgtcgagagctaatccaggcgcatcaattaacttttacgcctcatcagctccatgaagatattttatggaccactcggctggcgttagccgcacagcgcgtaaattactgccctgaaccgctttatggctatcgcaccgcgccccactccatcaccagaaaacactgttttcatctaagaatgttacgagcagcgagttatctcgatattatcagcgaattagtccgtattgcggcgcaatcagagccagtgctgagcaaggcactgctacgccacgctaatcgagaaagcggccagctattaggcttaacccgttggcaaaccagaacctgcgcagagcgtagccagcttgccagacgtttcaaagaattaggattggaaatgcccttaatccggggagcgatcggcctgcgggatttctggcgggcgctacgttgcattatcattttccgccgctacgccagacaaaaaccttcacttaaggccgataaaagggtttgtcaccgaggatcgtggcccgatgcataatccgacgctccggcaaataatccgcattggcgtaatgctgggtaacccgattatcccaaatagccacgtcatcctgctgccaacgccagcgcacctgaaattcgggtttcgtcgcgtgagcaaacaggaatcccaacaaagcctcactttctttagcgcttaattcattgatttttgtcgtaaaaccttcattaacgaataacgcctgacggccactgaccggatgggtgcgtaccaccggatgcaaaagcggcggattcttctctttcgccagcagccagcgttggtgatcttccagcgtagcccgatgcttatgctcagggaatgatttagtaaaatcatgctcggcctgcaatcccgccagaagctgcttaaacggggcagatagcgcctcgtaggccgcgatgccgctggtccatagagtgtcaccgccggtagcaggtagatgcttcgccgccagaatggcacccaacggcggattggcgatgaaagtcacatccgtatgccagttatcattatccggcggattatcatcgtgagtatccagtacgataatttcctcacactctttgacgtgcggataaactggatgaatatgcaggtcgccaaaacgccccgccaaatctcgctgctgcaacggcgttatcggctgattacgcagaaagagcacctgatgtttgagcaacgcatgataaagctgctcaaattgactatcgcccaatgggcgggaaatatcgatattttcgatttgtgcgccgatataaggcccaaggggattaaccactaaacgttcgttcattgttgcactccgtaccaaggggttaagcggcgctgaatggcccgaagccctaattccatgctgaaagcgattattgcgattacgccgataccggcgataaccacatccgttgctaaaaattcaccggcagactgcaccataaatcccagacctcgcgtggctgcaatcagctcggcggcgactaaagtagaccaacccacgcccagaccaatgcggatgccggtcagaatctcgggtaaggcactcggcaataccacatgtcgtaatacctgccaacggttggcacccaatgcttgcgcggctctgactcgcacctgcgctacgctgcgcacaccggctaccgcagccagagtaataggcgcgaaaatggctaaataaatcagcaaaatcttggatgtctcaccgatgccaaaccaaatcaccatcagcggtaaataagccaaaggaggtacgggccgataaatttcaatcagcggatccaatatgccgcgtaccgtcggacttaatcccatagcaatgccggttgggattcccagcgcgattgccgctaataaagccagcataatccgcccaaggctggcggctaaatgctgccacagcgtagcgtccataaagccttgtgggctggcaatggtcatgagctgatgcagcacttgctgcggcgcaggaagaaagagcgggctaatcagttgcagcgccgtaacgctccaccaaatcactaatatcagcgctaacgtcagcaaacttaaccctaaactgcggggcaataactgcccgatagagcgaacgaatcggcggctaattcgccctgaagatgccgtattcggtgccgaagaacgcaatgtgctgtgcaggctcatatcaaagcctctcgctgctggaatactttactcagcacatattcacgctgagcaatgaattctggatctgacttaattgagcggcaggcttcgccattggcatatcgctgaccaaaattgagcgtcaaccgttccaccacctgccccggccctgacgataacaacagtagctcgctggctaaaaaaacagcttcttcaatatcatgggtaattaacagcacctgcttaccggtatcgcgccaaatattcagtaacagttcttgcatctgctcacgcgtgaatgcatctagcgcaccgaaaggttcatccaacagcagcaagcgcggatcaaccgccaatgcacgagctattccgacgcgctggcgcataccgccagagagctgccagataaagtgatgctcaaaaccgcttaatccgacctcgcccagcattttcaacgccgtttcacgtcgctgcgagggatccatgccagccagttgaagaccgaattccacgttgctaatcacatctcgccacggcagcaatccttcatgctgaaacaccacgccgcgatcggcacccggcccagtaatcggcacaccgtctaaagtgatacttcccgccgagggttgaataaagccggcaatcaggttcaataacgtggtttttccgcatcctgatggcccaagcaccaccaccagttcgccggaggctatatttaacgacacattttttaatgccgcttttccctgatattccgcactcaggccgctgacgtttagcatctggcctcctaagactgcggcgctgcttgtaccgctttaacaaagcggtcggtaacgtaatcgctgtaatcctcagcaacctgcggaattttcccctgcgctttcaggaaggcggcagtatcggcaatcgccttatccacgggtttgctcagttgggtaatttgctcggctaccggtaaataagtatttcccttcactaattcgggaatctgagcttccggcacgccgctcaaacgggaaagctgttgtagattttgcgcgtttatcagccattggttcggttgagacaaataagcctgctgcgcatccagcgcgctacgggcaaaggcggtcacaacttcaggatgcgccttggcgaaatcttttctcaccacccatacatccagcgttggtgccccccagcgcccgacttccgccgaatcggtcaacactttgcctgttttcgctaattcatttaccgcaggtgcccaaacataagcgccatcaatatctccgcgctgccacgccgccgcaatggccggcggttgtaaattcaggatagtgacctgatcgggctttatcccccaatgttttaacgccgccaacaggctgtaatgcgttgtagagataaagggaaccgcaatgcgtttgccgatcagttcctgcggcgttttgatgtcttttttcaccactaaagcttcggaactaccgagttgagaagccagcaaaaacacttcaatgggaacctgctgactggcagcaactgccaatgggctggaacccaaattgccaatttgtacatcgccagaggccagtgcgcgcaccacgctggagccactgtcaaatttgcgccaatcgaccttggctccggagagtttggcaaaactgttttctgcctgtgccactttcgccggttccgcagccgtctggtaggccacggtaacgtccaccgcgtgggcagcagtcgttgccagcgacaacaccaataaactcaaagagaaaggtttgaacgccatggtttgctccacttggataaagttgccattcagtgacatcactgcagcaggagcgcaaagacgctcggtatccacagttgtacccaagagagataacgacataaaagaataaaaaaatattttttattcttttgatgaataagagataaataaaacggcagagtgaagctcgagccaataagaggatctggggtgagtatcgctgtcacagacccggagggaaataacctatgagtctgattcagcgcataaaaatcgagatattaattacaacacaattgcgccttgcagaaatatcttggcataaccggcaatcaccgtgcgatcgcctttcaaggtacagaaaagctcgcctccccgatgcgatatttggcgggcatggagactatttttacctaaacgcgcggcccaatatggcatcaaagtacagtgcgccgagccggtcaccggatcttcatttccacccaacgtaaagaagcgcgaaacgaaatcgactttatcgccgggggcggtaacgatcacaccacgccccattttttcgatcagttcgccaatatcaggctgcaaatcatgtacctgctgttccgacgccaatactactaatagtgatttagcctgcaacaccagctgaatgtccacgtccagcagcttagttaaaatgtctggtgtagcaatagcttgcggcggtagagaagggaaattcaaggataacagttcaaaatcttcggcttcgcgcttcacataaagctcgccgctggcagaacgaaagacaatgtcactcaaggccggattgacatggctgaacatcacatgcgccgctgccagcgttccgtgtccgcacaaatccacttcccgcgttggcgtaaaccaacgaatcgcagtttgatccccatcatcccaaataaaactggtctcaggtaaatgcaattccgcagcaatggcttgcatgtgctctgtcgttaacggacgttttagcaggcagacgccagccggattacccagcagaccctcgccaacaaaggcatctacgtgaaaatagttaaaatcgctcaaatcgatatcctatagcagcaaagtattgatgtgattaatgccagatcagaagcacacaggccgccgtcaatatccccatcgagacattaaaggtaaaccaggcgcggcggctacgcagcatttggccgatcacactaccgaagcccaaccagacgataccgcacaccagattgaccaaaaacatacccaagctaatcatcacgatggaatgatcataggcggcaccggccagactgaaactagcaaccgagcctaatcccatcaaccaagcctttggattaagaaattgtagcagccagccttgatacagacgcatcggtttaggcggtgcaacgtcggtttcgagtttttgataggcagaagtggcaactttccatgccaaccacagtaaatagaggctacccagaactttcaatgccagatgcagcgaagggtaaatcaaaatcaggctgcccacgccgaatgccacgaacaacaacacactttgcattcccagcataatgcccaacatcagccaaatggagcgagtaaagccaaagttagcgccagaagcagtcaacaacatattatttggaccaggcgtgattgcggcaacccaaagaaaacctaacatcgaaagaaataaacttagctccatgaaacgggtgcctctcacccttgaaatagatgcgatatatcattgaagctaacagtgtgatattgatcatacaagagcaatagcatgatttaaattcatcttatgtatgagatctttcgcccgctagccggtgccagtaacccacatttacagactctgttaccccgcctgatccggcgtcgaatacgtctccagccgttttggcagcgcctaaacctgcccgatggagattttgtcgatctcgcctggagcgaagatccagacctcgccagagaaaaacccagagtcgtactgttccacggtctggaaggcagcttctacagcccttatgctcacggcctgctgcatgcctgtcgagaacagggctggctcagcgtagtcatgcattttcgcggctgtagtggagaacctaatcgtaaatcccgcatttatcattccggcgaaacggaagatgcccgttttttcctacagtggctgagggacagctatggtcaggtaccaaccgctgccgtcggcgtctctctaggcggcaatatgctagcctgctatttggcgcaacagggggaaaatagcctattggaagctgcggtcgtggtttccgctccactcatgctggaaccttgtgcctaccgtctggaacagggattctcacgggtctatcaacgttatttgctcgatcaactcaaacttaacgcgacacgtaaattattaagctatcccggcagcctaccgctggatttatcccagctaaaaaacttacgccggatacgcgattttgatgacgtcatcaccgcacgaatacacggttttaccgatgcgctggattattatcgccgctgtagcgccctacccctattaccgcagatccgtacaccgctgctgattattcacgctaaagacgatccttttatgacgccagacgttattcccgttcaaacggcattaccgtcgaatattgaatatcagttgacggaacacgggggtcacgttggttttgtcggcggctctataaaacaaccgaaaatgtggctggaacagcgtattccggcctggctatccccttatctggagcaaaaatgattattccatggcaacaaatagacagcgctacgctggaaaatttgatcgaagctttcgtgctacgcgaaggaaccgactatggcgaacaggaacgatcgttggaacaaaaagtggccgacgtacgccgccagttagtcagcggcgaagccgtattggtgtggtcggaactgcatgaaacaatcaatattatgcctaaagcgctatttcgtgccggctcagaagagcaagaataatccgtcactcactctgttatttcaccgtggtgtccaacgcgataccacagtgaaacaagatgacaaaaccgccgctttgccctaaaagtaactatcagctatttttcttcggccattatccccagctcattactggcagataaatcataataatcctttgaaaaatataacaataactcagtaccctacggagcagaacccctatgtcagccaaacatccggtgattgcagtaacaggctcaagcggtgcaggaaccacaacgaccagcctggcttttcgtaagatatttcaacaactaaacatacgagcagcccaaatcgaaggggacagtttccaccgctacacacgcccggaaatggatgcagcgatccgcaaagcgcgggatcttggccgccacattagctattttgggcctgaggcgaatgatttcggtttactggagcaaagcgtgtctgaatacggcgagcacggccgaggacgctcacgcaagtatctgcatacttacgacgaagccgttccctaccatcaggtgcctggaactttcactccttgggagccactgccagaacccaccgacgttttattctacgaaggtttacacggcggcgtagtgaccgaacaccatgatgtagctaaacatgtcgatctgttggttggcgttgtcccaatagtgaaccttgagtggatacagaaactggttcgggataccggtgagcgtggccattcacgagaagcagtgatggattccgtggtgcgttcgatggatgattatattaattacatcacacctcagttttcccgaactcatatcaacttccagcgggtgccaactgtagatacatccaatccttttgcagccaaagctattccgtctttggatgaaagttttgtggtgatccatttccgcgggctggatcaaattgatttcccttaccttttggcgatgctgcaaggttcattcatttcaaatatcaatacattggttgttcccggcggaaaaatggggctggcaatggaattaatcatggcgcctttggtacaacaattattagaaggaaagaaaatcggctgattccggcagagccaatcaatacgtaacctctaataaatgaagacggctatcatttgatagtcgactcttatcagtgaataatccatataaaaataataaacaaaatcataattaaatacatcaacaaattaatcacttttatttaaaataaaacagtgctagtttttattcgcccattactgtttcatacccaataagccatgctggaaaaacttaaggagtgtataaatggaaatagcggatattggccgtactgcacttatagagaccgatagattaagaagaaatggaagctgcgtattttccacatgtgaatatagcaacccgactggcagccatacagatagaatattcattcatgcaataaatgaattggaaaacaatattatcttctttcccacgggctaaaagataatggctcaattgcgaaaattgagtacgcaatcttgcccctagctctaattaccgttttattatgcttttcaatttagttatcggaagcagtgggttagcaaccccctctccggctcagcgttttatcggtattcccaacatgattctctgtgctattggtacagttctatacatcacagtatcaaagaaggtgtttctatatggctggcacacccatgagcgcctaacgctaaggaatatcattacatgactaatcgccgctatttatttaagcaacaatagaaatttattactgatagataaatatcacgcagcacctatttctaggcttattatcgtagaatatatttttgttttttatcttattcagataaccatgttctatttaacaggtattcaggtgtcgctaaatttattaacactacctattttcacattgttattgtcgtacctcgacgaacgtattctgatttcatcaaggagtattttttcattaaggttcatactggcaatgttgctgtttatgtccgtttataaattaaagaccattcgataacatggagttaaacatgattaaagtcgtcattgttgatggtttttcttccggaaaatttctggcgaaggaactatttgatgcgggttgcttgctattacacatttcgtctagcgctgatttacatgattactactattatgggtttgattattcgatctattcgtcgctactcacccatcaaaacttatccgataccaaccaggatgttgcgctattcgcccccgattacatcattgccggagctgaaagtggccttttgctctgcgacgaactcaatcatcgctttggtttgccttttgccaatgactataaccatagcgaagcccgcagaaacaaatatgccatgattgaaaccattacccatgccggtttagctgccgcacgacaaaccaccgccagcgaatggccagccgccgaacgttggattaaatctcatcacggctaccccgtcgtactaaagtcgttggccagcgcaggctctgaaggcgtattcatttgccattctcaggcagaggctgaagacgcatttgttcaaataatgggtagctacagcaaattaaatgcggttaatcagcaggtgttaattcaggaatatctcgaaggcgcggaatacgtggtgaatatggtttcactgatgggcagaccgctggtaactgaagttgtccgttacaccaaacttcgtcttgcttcagggcggattctttatgatatcgatgaaattctggatgcatccttcgagcattatcaggcgctggttagttacactcgccaggtaattgagtcattaggaattcgcaatggccctagccatgcagaagtgatgttaacaacgtcggggcctaaattagtcgaggtggccgccagaacggacggaattctgcgtcctaccatatcggcgcgtaccaccggattggggcaaatttgtgccacggttatggcaatcaccgcaccgacgcagtttctgtcatttaccgaatgccatccgtcataccagctacaaaattactcttacaatatcggcctgattaatagacataaaggtatcttccatcagcaggattttttatccgaacttcttactttaccgtctttttcactggctgatttttatgtagaagaaggtgatgctattggggtcactcaggatgttttcagccagccaggtgctatttatctggttcattctgacgcagaaaccattcgcaatgactatctaacgatcaggcgcctggaaaacgacggcgtttatcttaaaaatgtataggaataaatacgataacagcctgatagaaaatcaaaaaattgaaccgcggcgattgactgcgaaatatgaatcgcggtgagtaagggaacagcgggggatttaacgatttaagatgtttgagtctttgagtctttgagtctttgagtctttgagtctttgagtctttgagtctttgagtctttgagtctttgagtctttgagtctttgagtctttgagtctttgagtctttgagtctttgagtctttgagtctttgagtctttgagtctttgagtctttgagtctttgagtagcagtttccggataaacaggcagtgatacaagcaattctgtacgtatatgaatcctataaatacaacgcccggagcgaataaaccgggcgttgataaatatggtcaggttagagagcgaatttcaaaactgtgggtgattttggcagccttacccaacatcagggctaccgagcagtatttctccgcggaaagctcaacggctcgctcgacggctttttcggtcaaatctttaccactgacgacaaaatgcaggttaatcaaggtaaacaggcgaggggcttcctcccgacgctcggaggtcaattttacttcgcagtcgtgcacatcgttgcgccctttttgcaaaatggacaccacatcgatagcgctacagccaccggccgccatcagcaacatttccatcgggcttggggctttatctccggcgttaccatccattaaaacctgatgaccagaggcggattcacccaaaaaagtcagaccttcaacccattttactcgtgcctgcatacccgtcactccctattagcttttccgaatcagactactctttcattcataaagtggcaatgtaaccagaccctcatcatgctgaagcgatacaacacaagacactggcctcatcctgtgctacaaacagagccgaagagatgtttcttagaataaaaagggtagagatcaagactcagtgaagggtctctatctgagatgtatattggctatacctttcggtagttgagcaaattaatatgctaatagaaagtgtattttataaacacgccgtacagggaactctgagccctgttaagttaggcagcgataacaacagaggataacagcgaatggttctcggcaagccacaaacagacccaactctcgaatggttcctgtctcattgccatattcacaagtatccatcgaagagtacgctgattcaccagggtgaaaaagccgaaacgctttactacatcgtgaaaggttccgttgcggttctgatcaaagatgaagaaggtaaagaaatgattctctcctatttaaaccagggggatttcatcggtgagcttggattatttgaagaaggccaagaacgtagtgcttgggttcgtgcaaaaaccgcctgtgaagtggctgaaatttcttacaaaaaattccgtcagctgattcaggttaatccagatatcttgatgcgtctgtcttcgcagatggcgaatcgcctgcaaattacatccgagaaagtgggcaaccttgctttccttgatgtgaccgggcgtatcgcgcaaacgctgcttaatctggcaaaacagcctgatgcaatgacacacccagatgggatgcagattaagattactcgccaggaaattggccagattgttggctgctcccgcgaaaccgtcggtcgaatcctgaaaatgctcgaagatcaaaacctgatctctgcgcatggtaaaacgattgtcgtttacggcacccgttaattacctaaaaaaaccggttccctgtgcttaacatggcaccggttttttctttgtctgcatatggacgacggatattgacctgatgtggcgtcggctgatttaccaccctgaagtaaactatgcattacggcaaacgctggtgctgtgtttgcctgtggctatcggtttgttgctcggtaatttgcagcttggcctgttattttccttagtccctgcctgctgcaatatcgctggcctagataccccccataagcacttcaccaaacgcttagtcgttggcggaactttattcgccctcagcagttttctgattcaacaattcctgctgtggcatattcccctccccctgattatgtttggcctgactctcattttaggcgttaacggagccatcagccccctgcacgcccgtttattgcccgctgcgctagtcgctgcgatattcacactaagcatgattggccgcttcccaatttggcacactccgctacttttcatcgttggcaccgcctggtacgggctatttaccggcctgtggttccgcctgtggaaagaacagccgatgcgagaaaccctgagccagctatatcgccagttagccgattatttagaagccaaatacagtttgctgactcaacatatcgatccggaaaccgcattgccgccgttgctacaacgccagcagggcgtaatggatttaataacccagctttatcagcaacttaatatgcttcctcatactcataaaagggagcaaaagcggctacgattaatgtttcaggtggcgctggatttgcaggagcacattactgtcagtctgcaccaaccggaagaagtgcaaaaactggtggaacaaagccatgcagaagcggtcatccggcggaatgcgcaggtcattgctcatcgtttgcgggtcgtcgctgataatcttctgtatcaccgccatgaattacagcgttttaccatgaccaacgagctggcagcgctggaaaaaatcgccggacagcacccggataatccggttggccagttttgttattatcatttccgtcgcatcgcgcgcttgctgcgtaaccaacggccgctctatcggcgagatttaatgtcggaccaacaccggttgccgttctggccagcgctcgccagttatctttcgtttaaatccgtcgcgctgcgtaatgccggccgtctggccgttacgctagccgtcggcagcagtttgggaatggcatttaatctgcctaaaccctactggattttattgaccgtgatgttggtcacccaaaacggttataacgcgacgcgggtaagaattcagcacagagccttgggaacgttggtcgggctggttattgcagccggtctgctgcaacttcagcttccacaaggtaccacgctgaccattatgctgtttatcacgctagccgcgtatttggttctgcggaaaaactacggcctggcggtcattgggctgactattaccgccgtgtatacgttgcaactgctggcactcaatggcctgcattttctggttccgcgcctgattgatactctgattggctgtgcgctggcctttgggagcaccatctggctgtggccgcaatggcaaagcggtctgctgcgtaaaaacgctcatcaggcactggaaagcgatcaaaatatcctgcagttattactcaaaaagacgcctaaccttggcgagctggcaaatgaacgaatgcaggttaatcaggcacataacgcggtgtttacttcccttaatcaggcaatgcaggaaccgggctttaactcccgttatctggccgatatgcgtctgtgggtgactcacagccagtttatcgtcgagcatatcaacgcgatgacaattctggcgcgggatcattacatgctgacagagaaactggcggaagagtatttacagcgctgtgaaattgcgttgcaaagctgtcagcagcggttggaatacgacgggccgagcagcgaaaatagctttatgcgtccaccagagctacatccggatatgccaatcaccgaaatggaacgccatctcaggcgcattttgtcccatctaagcgtgatgcacaccatctcgtctttagcctggcgacaacgaccacatcatggcatttggctgagcagaaagcttcgggatagctgagtgtttaaaaaaacactagcggaacataattgaggaataaattaccgggctgatgaggcgtcctaattacaggacgccactgactaacttttggagatgcacatcttgcagttgcccaacgccaagccgattcatactgtctctgtgatgaccacgcaacaaagcggcgacttgccgttattcagcgtctagaactgcggcaacagcctgcgcaaatcgcgccataccctgctcgatgtcttctaattcaatcactaacgatggtgcaaaacgcagcacattcggcccggcgtttaaaatcatcaatccgttggccgctgctgcggtcaggaaatcacgcgccctcccatgatactgtggcttcagctcagcgccgataagcaatcccatcccgcgaatatcggtgaacagatcgtattgcttcccgatagccgttaatgcctccgcaaacaggtcgtgacgctgcgctatgccatctaacacctgtggggtattaatcacatccagcgccgcttctgccactgcacaggccaaaggattacccccgtaagtcgtaccgtgggtgccaacggtcatcaccgaggcaatttcctccgttgtcagcattgcgctgattgggaaaccaccacccagcgccttcgccgtggtcaggatatccggcgtaatgccgtagtgcatataggtgaacagcttgccgctgcgtcccatgccactttgaacctcatcgaataccaacaatgcctgatgacgatcgcacagttcacgcagcccctgcatgaataccggatccgctgcggtgatgccgccttctccctgaatcggctccaatacgacggcgcaggtatggtcgtccatcaccgcttttactgcggctaaatcgttgaaaggcacgtggataatatcagcgggttttgggccaaaaccgtcggaatatttaggttgcccaccgacggatacggtgaacaacgtgcgtccgtgaaaagcattatggaaagcgataatcttggttttatacggactatggcgctcaatggcgtagtggcgcgccagtttgaaagcggcttcattggcctcgccaccggagttggcgaagaacacccgatcggcaaaggtagcgtcaatcagcttctcagctaggcgtaatgcgggttcattggtgaaaacgttgctggtatgccacaaggcttccccttgctgatgcagcgcagcaaccaacgctggatggcaatggcctagagccgtgaccgcaattccgccagcaaaatcgatatattcattgccttgctgatcccagacccgactgccttttcctttaacgggaataaactgagctggtgcataaaccggtagaatcactcgatcaaacgtgctccgatttaccgctgatttttctgtcattccgctgtccgccttgatgatacgcgctgataccgctcgccattagtgaaaatataatcacaaaatatgcataaaaaatcacaaacaggcaaacaaaaaacgctacgaacacgaaaacaatcgtaatgcattaatttttaaggaaattatccagcagctgatgaccttgctcgctgaggatgctttccggatgaaattgcacgccttccagcggaagcgtgcggtggcgtatccccataatttcatcgaacgcaccgtttcgctcggtccacgccgtcacttcaaagcaatctggcagcgtttctggcgcgataaccagagaatggtagcgagtcacagtaagtggctgatttaatccacggaagacaccctggttattatggttaatagccgtggttttcccgtgcataacctgacgcgctctcacgatgctggcacccaaagcttgccccagcgcctgatgccccaaacacacgcctagaatcggcattttgccggcaaaatgaccgatcgccgccagcgagataccggcttcgttcggcgtacaggggccgggcgaaatcaccagatgggaaggagcgagttcttctatatcagagagttgcagttcatcattacgctttaccagcacctctgtacccaattcgcaaaagtactggtaaaggttgtaagtaaacgaatcgtagttatcaatcagtaatagcattttcaatccaacctaaatcatgaccctgccatcttactgattttcacgtcattcgttgatgagtttgtcgcaaaacctagcgtttacggccaccggtaatcgaacccaatacaccgcgcaaaatttgccgccccaaatctcgcgccatgcttttagccgcagtttggacaataccatcacgcttgccgccgcgcgggccggtagaaccaaacagcaaatcgttcaatccagccatcagcccaccgccagctgccggttcattaggcgatgacggcacagttttgcccgcttcggcagcctgtccaaccgtagaaaaaccgtctgcggccagtttttcataggcggattcacgatccaccatttcctcataacgaccgtacaatggcgaatgattcagcgcatgatttcgagcggcatcatctaaagcacccattttcgattgcggcgctatcaccatcgcccgctccacgacgtttggccgtcccttttcatcgagaaaagagactaaagcatcacccacgcccaattcggttatggcttgttccgcgctaaaagccggattggctcgcatcgtttgcgctgccgattttaccgttttctgatcgcgaggagtgaacgcgcgtaaagcgtgctgcacccgattaccaagctggccgagaattttatcgggaatatctagcggattttgcgtaacaaagtaaattcccacgccttttgaacgaattaagcgcaccacctgttcaattttgtccagcaacgccgttggcgcatcgttgaacagcaaatgagcttcgtcaaagaagaacaccagctttggtttctctacatcacccacttctggtaactgctcaaacagttccgccagcaaccacagcaggaaaatggaatagagtttcggctgattaatcagcttatccgcagccagcaggttgataatcccccgcccattgctatctactcgcattaaatcctgaatatccagcatgggttcaccgaagaactggttcgccccctgctgctccaaggtcaataaaccgcgctgaatcgacccgatagaagccggcgagatattgccgtactgagtgcggaaatctttggcgttatctcccacaaactgcaccacggcgcgcaaatctttcatatccagcagcaataagcctctgtcatcggcaattttaaataccaattgcagcacgccgctttgcacatcgttcagatctaacaaacggcctagcagcaaaggcccaagatcggaaatcgttgcccgaaccggatgccctttttcaccaaagatatcccacggaataatcgagcaagcctgcggctcccagtcattgacgccaatcgcagccaaacgagccaagagtttttcagatcccgcgccttcggcaccaataccggacaaatcacctttcacatcggctaaaaataccggtacgccaatgcgggagaattgctcggccattttttgcaatgtcaccgttttaccggtgcctgtagcgccggtaatcaaaccatgccggttggccaaagccggcaaaatcgccagctcaccggttgcagaagcggttcggcctccagttttagcaatgactaacggctgctcactcatttgccttcaccttttttattctgaaacgattttattcagaaacgatagctttatgccgaaattataggcgcgaatctcagtaacatcctctgtttgccaaactgcagccccccgcttgcgagtaaagtatctagctataaaaataccgtaccacatggaaaaacaccggagcggcaaaacataaagaatcaatacgatccatcatgccaccgtgcccttcaatcatggcgccgaaatctttaattccgcgatctcgtttgatcgccgacatacacaagccgccggcaaagcccaataaggtaatcagcaacgagattaatccggcctgccagaagctaaacggcgtcgcccaccataaactggcgccaatcaggctggcgctgagaattccgccgataaaaccttctacagttttattcggacttaatttcggcacaataggacgtttgccaaaaagcttaccgaatacatattgcagaacgtccgaaagctgcaccactatcatcaaaaacagcagcagtttgatattttgattttcatagccgggaatattcagcatcagcagcgctggcgcgtggctaatacagtaaaccgcaatcatcatgctccactgaattttcgccgttcgctcgaggaaatgctgggtatcaccggataaagcaatgcgggttggaataaacagaaaagcgtaaaccgggataaataccgcaaatatcccgtaggcttccataccaaccaataaatactgtaccggcagcataatgaagaaacaccaaaacagcgcttcatgatcgccgcgtcgggttggcgtaagagtgatgcattctcgcagggcaaaaaatgacatcagagcaaataacaccacagaaccaatagtgcccagcgccatcgccagcacggaaataatacacatcaaccaccaggctcgaatgcgggcattcaggtttaaaatagtgctacgtgccgcaggagaaacgttcacgcgggaaagaataaagccaatcaaactggcgatcgtcaataaaccgaataaaccgcacagcagcaattttaattcattatcaaacgccatcatggtgccatttcctctagtgccgctttaattcgcgccagaaaagccgctttatcttctcccgcctgcaagcctgtcaccggtacgccaaaggtcgctgagcaaataaaaggcaccaccagtttggaacctttcggtaatacgcgattgaggttttccagccacacgggaactaattcgacgtctgggcattggcgagccaagtgataaatcccacttttaaagctttgaatattttctccatcaccgcgcgtgccttcagggaataaaattagcgactgattgttctccaacgtttccaatagcggcgtcagcggatttttacgcgcttcagcgcgaccctccaccgtacggcgctccaccagcaccgcgtgaaaaacatacttcgccagataacggcgtaaccgtgttttcgaccaataatccgctgctgccactggatgaacctgactgcgcaaatggcgcggcatgctcgcccagatcaccagcccatctaaatgactggaatgattggcatagtaaattctgacctgtttatctggtaacggagcaagccagcgagctcgaattccggtcagcaaacggcataaagacaccagaatggtcgccaccagtttgctactgagaataaaaggaaatttaatcattaggtggcaattccttccgctggagttcattcattaccgcgcgggtacgtaaaatcgcggtaacaatggtcccgaggccaataatccacaggcagagatataaaatccattggttataggcaggcacaactgcggcaatcactgtgccgagggttaacagagccatgcggtgttgcttagccattggcccactgaattgttgagctaaaccgcagctaccgcccaaaacgcggacataggccgtcattgcggcgaatagtgctgcggcccagcttagcgttattgcatcggtaaaagcggttaaaccgtagcccacgccaattaaaatcaaagtatcggagatgcgatccggtaaatcgttatataccgcgcccacagggcttcgtaatccgccttctaccgcgaccatgccgtctaataaattgcagattaaccgagcctgaatcatgaaagccgcggcgataagcaataggccgctgaccagcgctgaatcctgacgaaaagcgcagaagaaactgagcccagccaatgcagaaaagagaatgctaaagagggaaatgccgttgggcgttgcgccgcgctgttgtaatactctggcgaaggtcgtcgcccacgctgtatttctggcacgtattggccgacgatctttaatatcctgattcatagtcaattaactaccttgtcaccgcagaaaataatccatacaaccctgctcggctaattactcagatactattgtggtgattcctgggctatcccaatatggattctattccggccaacgttatccctaaccaagttgggttaatatacagcaaagatgtggcaataatgaggactaaaaaagcggtgagagtcgcgcttaattcgatgctaagaaagggatgattggacggaattaacgctgagagtagtgaaaaccccgcggctagttattacagcaacggggtgtcgagaactaaggtaaaactttggctgacaggatggtaataggtttaaccggcacgttttggtacggcccgatattttccgtttgcacttgcgatattttatcgacgacatccatgccttttactaccttgccaaataccgcataaccaaaatcacgttgaccgtgatcgaggaatgcattgtccgccacgttcaggaagaactgactggttgcgctgtctttatcggcggtacgtgccatagaaatggtgccgcgcagattacgcaagccgttatccgcttcgttcttgattggctgattggtcgctttttgctgcaaatccgcagtaaagccaccaccctgcaccataaagcctgggattacacggtggaaaaccgtgttgttgtaatatccgctattaacataattaacaaaattctgggtggaaaccggtgccttctgattatcgagcgctaattcaatattccctgccgaagtggtcagcaatacatggggagcagcggctgcagaagcggctggagccatggcagtcagggagatcagcgtagcgaaggtcactaaagtacgtttaaacattacggttcctttctcttagagacaaacaacggaaaagcgccttgattctaaagagctgtccccctcagcgctacccatttaccaatatttacttaacacaacggacatttctgataaaaactcgtgtaattgcggttaatgcccgaaataagccgtttatacatccaatataagtgaatagttttgcaggccagatcacgccttgcccacccattttcatttcatccgccgtttttgcgagcttcatctcgttttgattttggttaatcgttaatcatctacaaatgagagcgctctcattttgaatttacctagtcagagttacgcgatgagggacatggcgacaggatgattagtgcggaatctctgtcggtagaaaacagtagctacccatagacattggccgaaaacctcctcgtagcttcctctgatacatacatgacgaaaaaccggcgagcgcagcggatacaactcgattagatacaactcgattaataggtatgaccgaggaaacggcacattgcttatcgctttggtttatacccggcaacatttatcaatgccttggtcatgtgggattcaatctttacgtgatcgaactttaccctcgccagagccgtttggaggccaacagtgaaaaagtttaaaatcgccattattggtggcggcagcagttatacgccggagttagttgacggtttaattcaacgaatcaatgagttaccggtgacagaattagcactggttgacgtcgaacagggccgtcaaaaagtcgaaatcatcgccgcactcaccgagcgcatgctggcacgccacggcctggagcaggttaaggtcagcgtacatttctcactggatgacgccattcgcgatgccgattttgttctgacccaattccgtgtcggccagctccctgctcgcgccacggatgaacgtttgggattgaaatacaacctgattgggcaggaaaccactggcgtcggcggctttgctaaagcgctgcgcaccattccagtgatgatggacatcgctcatcgggttgaacgtttggcgcccaatgcctggatcattaacttcaccaacccggccggcatcgtcaccgaagcggtttcccgctataccaaagctaaaatcattggcttgtgtaatgtaccaatcagtatgcatcacatgatcgccaatctgcttcacgcgccttacgaagatattcaactgcgctttgccggactgaatcatatggtttgggtgcatgaagtgctgcaacggggcaaagatgtgaccgccgacgtgctgaaaatgctgtgcgacggcgcgtctctaaccatgaacaacattaaagaagcgccgtggccaccagaattcctgcgagcaatgggcgcaattccttgcccataccaccgttatttctaccaaacgcaggatatgctgaccgaagaagtggcggcagcggccgagcgcggcacccgtgccgagcaggttatgcaggtggagaaagagctgttcgaactctatgccgatccagagctggataccaaaccggagcaactcagtttccgcggcggttctttctattcggaagttgccctagagctaattcggtcgatttataataatctgggcacacaattagtagtgaatactgcaaaccgtggtgcaattcgcggtttagcagacgatgctgtggtagaaactaactgtatcgttgatgctcaaggcgcacatccgctgacatttggtcaattacctgactcaatgcatggattaattcagcaggtgaaagcctatgagcgtttaacgatcgaggctgcggtccatggcgatcgcggcagcgcattgctggctctggtcaccaacccactggtcgccaatgccagtatcgctcagcctctattagaggaggttttggaggccaataagccttatttacctcagtttaaatgatgtaaagggataacaacccgctttcaaccgccagttttgctggcggttgaagtttggaaaaacaggagcagcacatggttacgctggaagacgtcgcggtactggccggggtatcccgagctacggtttcccgcgtggtcaacggtgataccaacgtcaaacccctgacccgagaaaaagtcgagcaagcggtggccgtattgggctatacccccaatcctgcggcgcgcgcattggcatccagtcactctaatactctcgggttagtcaccacctcttaccgtggtggattttttggcgcgttgatggattttgtacaaaccgaagccgaatctcacggcaaacaattactggtgacccaagggcgagataacgccgagaaagaatggcaagctattcaacgactgtttaacctacgctgcgatggattaattctgcacgttcgcttcctcagcgatgagcggctcagacaattggcggccacccagcgcccttttgtgttactggacagactggtaagcggtctggaagaacgctgcgttatctttgatcatcgccgcgccagccagattgccacacaggttttgatcgacgccggtcataaacgtatcgcctgcatcagcggctccgctgaacgtcagtctagtcaattacgattacaaggttttctggatgcgatggccgcagccgacttaacgccggtcgcctgtctgcaaggggtttacgatctggaaagcggctatctgcgggcggatgaagcgctgcgccagtctcaagctccgacggcgatttattgctgtaatgaagaaatggctctgggcgcattgctggctatcaataagcatcatttgcaggttccgcaagatatctctctgctgtgctacgacagcggcgaacgcgcgccttttgtttctccggcactcaccagcctacattttccaattgtcgaaatggctcagtacgccacgcgtttgttgattaacccgcaaacgcccgccatgagcttcgtccccacggtgataacccgcgaatccgtattaccgccgaaataagcctcaggcgtgacggcaaccaaaccgccacgcccttggttatctatgcgtttctatcagaaagtgacgttgagctttgcccaaatagttcgcccaggctcattcaccggagtattggctgaatagccaaagccgctattacccgccaaattaaggtgctcgctgtaatccttattcagcaaattatcgataccagtactcacttttatctgcgggttaaacttataggccacgttggccgaaagtacgccaaaaccggcgctgctggcaaaatccttcccaaccacgttaccttcgttaattgcgacccggtgctggctactgaccaaacgccacagcgcggtgctgctccaattaccgttctcataagtcagtccaaatcgggcttctaatggtgaaatctgcggtaatggtcggccgtcggtattattttgcccacgggcataagccagactggcatcggttttccaacggtcattaaaggcataagccatcccagcctcaccgcccataatggtggcgtcgatattgtctgcctgactgatccgcagattcttaggatcgtatttgaacaggatgaaatcattaaccttcccagcgtaggccgaaacccaggcgttaaactgctcaccgctatactgaccgccgatatccaattgggtggttttttcacttttcacaccgtcaaaagcgctggcagaaccggtaggcccaaaggtcggggaaaatagctcccagaaatcggggaaacgttcggtatgaccgatgcctgcatacagcatcaccggcgaatcagccaaattatgctcaaggcggataaaaccggcgggtagcgtggcagtgcgctccggttcatcagcgcgtttatagttagtgactgaatgatgatcgaggcgagcaccaacgatcgctttatcctgctcattcatttcccaggtcaactcactaaacacgccgtaatgagtgaaactggcgtttttgctccagtgggttttattgtttttacgatgagtatcggtttgcgcatcgcctccggcctctagtttgatatcctgccagagccaggttcccatcatgcgcccaccgagggtgcggcgatccagattactggacatcgccatatgcggtggcgtacgtaaggtactgttatccatcacatgattgacatagttgtaatagattttggcttcaattttatccagcacttcgccaatatgatttttctcaagacgtagccccaggctttctcgtttaaactgagaaccatccataccgcgtccggcgtaccgcgcctcgccatcgcctttacccatcgtcatttccaacagcgtatcttcatccggcgtccagcctagggcaagatcggcattccacttatcccagcgggatggcacccgattgcctacaccgtctttatagtcgccagcttgggattgattgcccatcatgcgcaaataaccctgatcgccgcctaaactcaggtcgagatttttgtcccaacggccgttggaacccaccagcagactcccattaccggtcacgccggtttgctcaaagcgtggtcgttcacgttcaaacagcacggttcccgcagatgctcccgcgccccacagtaccgactgcggcccttttaccacggtcagcaaatcgtagctttctggcgaaatataagaggttggcgcatccattctcgatggacaggtgccaagcgtctccgcaccgtcggttaggatcttcaagcgggaaccgaacatcccgcgaaataccacatcaccattggtgccgccgttacgaatctgagaaaaaccgggaatggttttcagataatcagcaccgtcgctggccggaaccggttggcgcggcgttttaggcgatgtcactatggttaatggtgaatactgcggcgcggtgacggtaatcacttcggcatcattcggttgattcacaacattcgacgcaggctgatggcgaacgtcagacgcactgatagcgctgaaagccaataatgaacaggaggacgctatggcgtaagccagtttgttttttttgcaggtgttatatttgttagacattattattcctaaaacgaaataggttcatccggcaaggttttatccatgccattagaatggttatttggttattttcactatcaggaataaaaaactggcggggcgcgtggctgtaatttggaataaacgtctttggtgacaataggttctgaaataaacaaaaccggcaacgtcgcggccaataaagacacgctgcgaatatcaggtttatccgtcgcattcagtaacggcagatggatcagcagcaggcaataatcacaggccgcatggttcatcatcggcgaatgattcgacatcggcataacgtcggaatgattcattgccgccatcgctaccgaatcatgataagagttggatgggtgtgaatgataatcagacatggccgaatcatcggtgtcgatgttcggtagcagtgcggctgaatcggcgttttgagcagaggccagcgttatagacaccatcggcgctataaacagcattaatattgcgaatatccccaaccaggcagaaaaacgccgtcgctgataacctatccggctcaacgtcacgcgctgcccaagggtgtcaatcccttcaccaaaacaatccctttatccagatgaataataaaatatcgatatcatggcctcagagcattccaaccctgagttttcccgcactgaaaaatagcgctgacacgaaccataataaaggcaagagcttactggagataagctcatccggtggttattaacgcattttatttgtgatgactcgccatttttcatcactaattttcatgtattgcactaaaattcggatacaagtcacaaaaacgagccatgcctgtgctaggattcgccgccttagcgctgaaaaccggtttggttccgttttagccctatgccagttaatcctaactcgtcttttattactgacacgcaggccctatctatgaacaacagcaatcgcattcggctcacatggatcagttacttttcttacgcgctgaccggtgcgttagttatcgtcactgggatggtgatgggcaacatcgcagagtatttcaatctgccaattgccagcatgagtaacacttttacctttctgaacgccggtattctgatctctatcttcctgaacgcctggctgatggaaatcatcccgctgaaacgtcaacttatcttcggctttattctgatgctgattgccatcgctggcttgatgattggccatagcctgatgatattctccgcgagcatgtttattctcggggtggtcagcggtattaccatgtctattggtaccttcctggtaacccatatgtacgaaggccgtcagcgcggttcacgcctgctgtttaccgattccttctttagtatggcggggatgattttcccggtggtcgcggcgatgctgttagctcgcagcgttgagtggtattgggtttacgcctgtattggtctgttgtacctggctatttttgtgctgactcttttctccgaattcccggttctgggccacaaagcgaccgacgcgggcaaacccgtagcgaaagaaaaatggggcatcggcgttctgttcctggcgattgcggccctgtgctacatcctgggccagctcggctttatccagtgggttccggaatacgcgaccaaaaccttcggcatggacatcggtcaggctggccagcttgtcagtaacttctggatctcttacatgatcgggatgtgggtattcagctttatcctgcgcttctttgacctgcaacgtatcgttaccgtactggccgcactggctaccggtgccatgtacatgtttgtgtctgccgaaagcccggagtacctgagctactacattctgactctaggctttgtttccagcgcgatttacaccaccctgattactctgggctcactgcaaaccaaagtttcctcaccgaaactggttaactttatcctgacctgcggcaccgtggggaccatgctgaccttcgtggtcacagggcctatcgtggcagagaaaggcgttcacgccgcgctggcaacggctaacggcctgtatctggccgtattcgtgatgtgtctggctctgggcttctttaccaagcaccgtagccacggccatgtgactcactaaccgtcggtaataaactcattaccctcatcataaaatagtcaccattattaccgccttcccagccagcgccgtgggaaggcggttttatttctcgcgacgaaaatcaataggttcttcatttcccacatatatccggctttgcgctggcagcgtctgcgcgataatttcccccgcacgcagagaatagcgcaccggtacctgccgcctcaccgcttcaaacccattttcagccggaagaatgatcagattagcctgatgcccaatggctaaaccgtagccgcttaaattcagcgttctggcgctattgtgagtcactagcttcagcccgtcattaatttgcccgtagcccattagctggcaaatatgcagacccatatgcagcacctgcaacatattggcagtacctagcggataccagggatcaaaaacatcgtcatggccgaaacagacattaatccctgattccagcatctctttaacgcgcgtaatcccccgccgcttagggtaggtatcaaaacgaccttgcagatggatattgaccaacggattggcaacaaaattaatgccggatagctttaatagccggaataaacgcgaggtataagcgccattataggaatgcatggcggtggtatggctagcagtgacccgagcgcccatcccttctttatgagccagcgccgcaacggtttccacaaaccgcgactgttcatcatcgatttcatcgcagtgtacatccaccaaccgctgatatttttgcgccagtgcgaaggtcttatgcaaggattccacgccgtattcgcgggtgaattcgaaatgcggaatcgcacccaccacatcggctcccaaacgcaatgcttcttccagcaaggcttcgccatcgggataagataaaatcccttcttgcggaaaagccacgatttgcatatcgacccacgggctaacttcttgctttatctccagcatggcttttagcgcggtcagggtgggatcggaaacgtccacgtgggttcgcacatgctgaataccgttggctatctgccatttcagcgtttgccaggcacgctgtttaacatcttcgtgagtcaacaacgccttgcgctctgcccagcgttctataccttcaaacagcgtgccggactgattccacgccggttctcccgccgtttgcgtggtatctaaatgaatatgtggctcaataaaaggtggcagaatcagcccgccctccccatccagcacctcatcgccggaaggcggttgagttagctgctcatcaatgccgataatcttgccctgcgacaggttgaactgccataaaccggggcgatcgacgcgccgcacactgtggataattcgcaccttcttcccagtcatccttcctcctgctgccctaaccgctttgacggtaaaaaatatcgctttcctttagcttacctaactcgcttccccacgttgccttttatttatttaaggtaaaaaaaccacagaactgacaccattcagctaaagatgaataaaatccacaacttatcaaaaaacgttataaatcatcaatctaccaccttagaggtatatgaggggcaaattgatttgcatcaataagcgcaatagcggggagattaaggtaagcgtagaaaactaaaaattgaggcaaaaatgagcaaagtcaaacttgccgtcatcggcaacggaatggtcgggcatcgctttattgaagatttactcgataaagcagacaaagacgcattcgacatcactgtattctgcgaagagcctcgcatcgcttacgatcgggttcatctctcgtcctatttttctcaccataccgctgaagagctttctctggtgcgggaaggattttatgagaaacacggtatcaaggtattagtaggcgaacgggctatcactatcaatcgtaaagagaaagtgatccactccaacagcggtcgcactctctattacgacaaactgatcatggccaccggctcttatccgtggattccaccgattaaaggcagcgaaggtcaggattgtttcgtctaccgtactattgaagacctgaatgcaatcgaagcctgtacccgccgcagtaagcgcggtgccgtggtcggcggtggtttgctgggtctggaagccgctggcgcgctgaaaaatctgggcgttgaaactcatgtaattgaatttgctccagtattaatggccgagcagcttgatcctatgggcggggatcaactgcggcaaaaaattgaacgcatgggcgttcgggttcataccggtaaaaacactcaggaaatcgctcatagcggcaccgaatgccgtaaaacgatgattttcgccgacggcacctcgctggaagtggactttatcgtcttctctaccggtattcgcccgcaggataaactcgctcaccagtgcggtctggctacggcgcgccgcggcgggattgccatcaacgattactgccagacctccgatcccgacgtttatgccatcggtgaatgcgcatcatggcaggaacgcaccttcggtctggttgctccgggctacaaaatggcgcaggttgccgtcgaccacctgctaaaccgggaaaatgccttccagggcgcggatatgagcgccaagctgaaactgctgggcgtagacgtcggcggcatcggtgatgctcatggacgcaccgaaggcgctcgcagctacgtgtatctggatgaaagcaaagaaatctacaaacgtctggtggtcagcaaagacaacaaaaccctactgggtgcggtgctagtgggcgataccagcgattacggcaacttgttgcagttggcgctgaacaaaatcactttgccggaaaacccggacagcctgattttaccgtctcacgcaggcagtaaaccggctatcggcgtagactctttgccggaaacggctcagatctgctcctgcttcgacgtcaccaaaggcgatattattcaggcagtcaataatggttgccataccgtggcagctatcaagtcggcgaccaaagccggtaccggctgcggcggttgtatcccactggtcactcaggtacttaatgctgaactgagtaagcaggggatcgaagttaatcaccatctgtgtgaacacttcgcttattcccgtcaggagctttatcacctgattcgcgttgaagggattaaatcctttagcgaactgctgagcaaatacggtaaaggctacggttgcgaagtgtgtaaaccgaccgttggctcgctactggcatcatgctggaacgattatgtgttgcagactgaattaaccccgctgcaagacactaacgacaacttccttggcaatatccaaaaagacgggacttactcaatcattccacgctccgccggcggggaaatcactccagaaggtctggtcgctatcgggaatatcgggcgggaatataacctgtataccaaaattaccggttcacagcgtattggcctgttcggcgcacagaaagacgatttacccgcaatttgggccaagttaatcgacgctggcttcgaaaccggccacgcctatgccaaagccttacgtatggcaaaaacctgcgtgggtagcacttggtgccgctttggcgtcggtgacagcgtaggcttcggcgtgaagctggagcatcgctataaaggtattcgcactccgcacaagatgaagttcggcgtttctggctgtacccgtgagtgtgctgaggcgcaggggaaagacgtcggtatcattgcaacggaaaacggctggaacctgtatgtgtgcggtaacggtggcatgaaaccacgccacgccgacctgctggccgccgatctggacgaagccacgctgatgcgttatctcgaccgctttatgatgttctacatccgcaccgccgacaaactgcaacgcacctcggtgtggctggagagtctggaaggcggcatcgcctatctgcgttcagtcattattgacgacaaactcggcattaacgatcagttagaggccgatattgcccgtctgcgcgaagctgtcatctgcgagtggaaagccactgtggaaaaccctgcggctcaggtacgtttcgctcactttatcaatagtccattacgcgacccgaacgttcaggtggttagcgaacgcgaacaacaccgccctgcccgccctgatgaacgcattccggtgcggatacttgaactggagaataaccaatgagccagtggatcactgtatgtccattagaggtcattttaaccggcaccggcgtctgtgcgctggtcggggaagaacaggtggcgatatttcgcccttacgaagatgagcaggtttttgccatcagtaacatcgatccttttaccgaagctagcgtgctgtctcgcggattgatagccgaacatcaaggtgacctgtgggtcgccagcccgttgaaaaaacagcattttcgtctacatgacggcttctgtctggaagatgaaagccgctcggtacgtcacttcgacgttcgggttcgcgacggcatggtgcaagtgaaggcttaagcgatctgatgcggcgacacggtaaaaattatcgcgtcgtcgacgatcaaaataattatttttatcttttggatcaattatgtacgcagatactttgaataaatgtgccgctaatgcagcgcgcatcgtaaaactggcaaaagaaagcccgctgggcttttggattagctcggcaatggcgggagcctatgttgggctagccatcattttgattttcaccttaggcaacctgatcgatccggcgctgcggcctttagtcatgggggcaacctttggtctggcgctgacattagtcattatcgctggctcagagctgttcaccggtcacaccatgttcctgactctcggcgtcaaagcaggcaccatcaaatccagccagatgtgggccgtattaccgcaaacatggctaggtaatctgctgggctcggtatttgtcgccctgctttactactacgctggcggcagcctgttaccggtagataccagtctggttcacgctgcggcattggctaaaaccaccgccccagccatggccttattcttcaaaggtgtactgtgtaactggttggtttgcctggcaatctggatggcaattcgcgttgaaggcgcagccaaattcctcgctatctggtggtgtttgctggcctttatcgcttcaggctacgagcactccgtcgctaacatgactctgtttgctctgtcctggtttggtaatcacagcgaggcttacaccatgagcggcatcggccacaacctgctgtgggtcactctgggtaacactctgtccggtgcggtctttatgggtctgggttactggtacgctacgccgaaagatcagcgtccggcagcggtcagcgccactgcgccacaaaccgcgaagtcataattgcgacggccagccctacttcggggctggcatatgccgccacagaattaaggattgctgatggattacctaccgattttctgccaactgcaccacaaagactgcctgctggtaggcggtggcgatattgccgaacgcaaagcgcgcctgctgttagacgctggcgcatgggtgaccgtcaacgcctgtgagttttcgccccagtttcacctgtgggcagaacagaaccggataacgctggtgcatggggaatttgccccagaattattggcagaaaagtggctagtgattgccgccacggatcgggttgaggttaatgcgctggtgtatcaaagcgccaatcagcaacgaattttctgcaacgtggtggacgatcctaaacgcgccagctttatcatgccgtcgatcatcgaccgctcgccgatcatgattgcaatctcctccggcggtaaagcgccagttttggcgcgcctgctgcgtgaaaaactggaagccatgctgccacagcatctcggccagctcgctcgtatagccggtaatctgcgtcagcgagtcaaacggcagttctccgccatgaccgcccgccgtcgtttctgggaaaaactactgtctcacgaccggttggcacagtctctggccaatgacgatcaaactcaggctaatcaattagtcgagcagctctttagcacgccattagaagatcgcggcgaagtggttctggtcggcgcaggccccggcgacgctggtttactgacgctgaaaggtttgcagcaaatccaacaggccgatgtagtggtttatgatcggctggtttccgatgaggtgatgaatctggtacgccgtgacgccgagcgcatttttgttggtaaacgcgccggacatcactgcgtaccgcaagatcaaatcaatcaaatcctgctggaacaagcgcagcaaggtaaacgcgtggtgcggctgaaaggcggcgatccctttatttttggtcgcggcggcgaagagctggaaaccctgtccgacagcggcattcctttctcagtggttccgggcattacggccgcatccggttgttcagcttacagcggtattcctctcactcatcgggatcacgctcagagcgtacgtttggttaccggtcatgccaaagccgacggtcagttagattgggctaatctggcggcggaggagcaaacgctggtgttttatatggggttatcgcaggcgagtgaaattcagcggcagctgattcgccaaggtatgagcagcgaaacgccggtcgctctggtagaaaacggaacctcgcgtcgtcagcgtgtcgtcagtggggaacttagtcaattagcgctgctatctcagcaggttagcagtccaagcctgattattgtcggcagcgtggtcagcctacgggaaaaactgaactggttttcatcccaagaacaaaccaacccaaatatgcagcaggaacaggctgaacaagccggttaatcctgatagttataaaaattgaccatgaaaaaagggacgagcttatcgtcccttttcttattgatgcgattcagtgagaaaacgctcttgaatcgttaccgcttacggatgagcgacaaaaccaatggcttcatacactttcgccaacgtttcttgcgcacgcgcacgcgctttagcagcgccatcacgcattactgactgaaggtaagcctcatcattgcgatattgatgataacgctcctgaagctcgctcagcatgccagaaaccgcttctgctaccgcacctttcaaatgaccgtacatttggccttcaaattgtgcttccagctcaggaatagactggccggtcacgccagacagaatatccagcaaattggaaaccccggctttttccttcacgtcatagcgaattaccgccggttcatcggaatcggtcatggcgcgtttgattttcttaaccacagatttggtgtcttccaacagttcgataacgttattacggttatcgtcggatttagacattttcttggtcggatcttgcaaagacatcactcgcgcgccggctttaggaataaaaggctctggaatcttgaagatgtcaccgtaaatcgcgttgaaacgaccggcgatatcgcggcttaactccagatgttgtttctgatcttcacccaccggcacctgattggtttggtacagcaggatatccgccgccattagcactggatagtcaaacagaccggcgttgatattgtccgcatggcgcagtgacttgtctttaaactgagtcatgcggctcagttcgccaaaataggtatagcagttcagcgcccagcccagttgagtgtgctcgggtacgtgggactgaacaaaaatggtacttttttgcggatcgataccgcaggccagatacagcgccagcgtatccagcgttctttttctcagtaaagtcgcgtcctgacgggcagtaatggcatgcagatccacgatgcaataaatgcaatcatagtcatcctgcatctgtacccactgacgcagagcacccatgtagttgccaatggtcagttcaccggacggctgagcgccgctaaatacaatgggtttactcattttacgcttcctgattttttaaagatgacagcccaatcgtgggcaacagatcggcaaagtgcgttaaaacgcgatccggatgactcgtggcaatagattcgccatagttatatccgtaggtcagccctacgcaagggcaaccggcggcctgagcggccataatgtcattgcgggaatctccgacaaacagcaattcgctggcgcgcagccccagttttcccagcatcagatacagcggagccgggtgaggtttcttctcgacaacatcatccccaccaataaccagtgagaaataatctgcgatacctaaagaagccagcagcggcgcgacaaacggcgtcggtttgttggtaatcagccccatcggcagaccggaggcggctaactgtgccaacgtgtcttttacctgaggaaacaattggctaccgcgctcaactgtctgggcgtagtagccatcaaagagtacgcgagtgcgctggcaaatctcatcctgaggctctacgccagcccaacgcagcgcgcgctcaactaagacgtcggcaccgttgccgatccaggtggaaactcgctccaaacctgctttaggcaacccctgatgctctaatgccatatccatcgcgctggccaagcccggcgcactgtcaactaaagtgccgtccagatcaaaagccagaccgcggatagagttaaattcagtcatgagccgccatcgccaactcgctgcgcattgcgtcaatcaccgcagcgtaatcagatttaccgaaaatagccgaaccggcaacaaacatgtctgcacctgcggcggcgatttcacgaatattatcgaccttcacgccgccatcgacttccagacgaatgtcataaccgctggcatcaatacgttggcgcacttgacgcagtttattcaaggtttcaggaataaacgactgaccgccgaagcctgggttaacggacatcagcaaaatcacatccagtttatccatgacataatcgaggtagctcaaaggcgttgcagggttaaataccaaaccggccttacagccgtggtctttaatcagttgcagagtgcgatcgatgtgttcgctggcttcaggatggaaagaaatatagctggcgcccgctttggcaaaatctggaacgatgcgatcaacaggtttaaccatcagatgcacgtcaatcggcgcggtaataccataatcacgcagcgcctggcacaccatgggacccatcgtcagattgggaacgtaatggttatccatcacgtcaaaatgaaccacatcagcgcccgcagcaatcaccttcgcggtatcttcacctaaccgggcaaaatctgccgacagaatggacggggcaatcaaaaactttttcatccgcttctccaaactttttatctgccccacaaagctcacataggcttcgggaagcacgagggtttgtatccttaccaggcgggaaatcccacttagctgtacagcgccaaaagctcgttcactttgctacgaccaagaatattacggctgatagtgcggcgcgctttcaccacatgtaatgacgcctgatgataccaatctcgcgtcaattcagtatcgtgattagaaataagcactggaatccggttttcagatgaaagctgataagccagacgagccagatttttttgatctgcaatgccaaagttattggtgtggtacgccgtaaagttcgccgttgcagatagcggcgcgtaaggcggatcgcaataaacaacggagccggaagctgcttttagcaaggtttcctgatagtgctcgcagacaaaaaccgcatttttagatttttccgcgaaccaatacaactcggcctcagggaaatacggttttttgtaacgcccgaaaggtacgttgaactcaccgctcaaattataacgacacagaccgttataacaatgacgattcagatagaggaacaacaatgcgcgccggtaaggatcttcacaggcattaaactcatgccgaatcaggtaaaactgatcggaattgttgtactcatcggtaaataaaagacgagagtcacgcacaaaatcatccgtgcgtaacttcactatgttgtagaggttgattaggtcgctgttgatatcggccaaaatatacgattcatactcagtgttcaaaaacactgaacccgcacctacgaatggctcaatcaagcagtctcccgctggcagatggcgtcgaatgtcatcaaccagcggatatttcccaccagcccattttaaaaaagcgcggtttttcttcatgccgtcagttagctacttaataattcagagccgcagattgtactctgtttcagacagcacatcagcgcacaaataaaaatgatttattttttcaggtcttgctgcacttggtgcacaggtttgacccacggttttttcgcctgaacgtcggctggcaaactcgaaatcgccttcttcgcttccgctgaagtagcataatttccactgaccaacacgtaccaaggcttaccatcacgtttagtttcgtaaacctgatagtgagttaatttttgctgtttcgcataggcattcagcgtatcggaacgagaggcgctgcttaactgtaaggtaaagtggctacctggcgcgttcttcaatgccccaccgctgctggctggtgctgcagtatttttggccgctgtactaccagtacccgctgcttgggtatttttatgcgcattagccacaggtttagcggcagttttctgcgcgggacgcgtggtgttatcacgtactgctggcgttttgatctcttttgaagaagatacggtagccggtgccgttggcaacgtcgatgtcaccgcgccattcatattctgtgaaaccgaatccacctgcccctgctgctgagacagtgcatcagacatgtttcccggtaaatcaacgcgctgggttggcgcattaccattcgccattggctgtgcttcagtaggggtggatgaaaccggcggagccgtcaactcttgcggctggccactattctgtacgccgttgccgtcatgaccatcgctggtgttgctcgccgtacccggctgagcgccactgccgttggtcagtgaagaggaatcagaaagattgatatctctggccgcaacgttaggattctgctgagaagcttcatgctgcgttggcgcttttaacgcggaaccgatagcaatgatgatcaacagcaacaccaaaataccaataccaatcatcaaatgctggcgtgagagagcaattttggggccgttcgaagtcttgcgcgaacgcgtaggacggcgatcgctggtatcaggcttcagatcgtcttccggttttaactcatccatctaaaccctccaactcgaggcaaaagcctaccgttgcatacagcgacggtccggcagattaagttgactgacaacaaagagaccagaacggacctttgcgaagaatatgatgtttatagcatacaacatcataatacttatgccatttaccctgccagacactcggcaatagaagcaaggactatctcgtgagagatgccgccgcgtacctctgatttgccaatagcagtaggcagtaccagccggagttcacccgccaatacttttttatcgcgcatcatgtgcggcagataagattctggtgccatctcctgcgggccgctgaccggtaaaccggcacgaaccaacagtcgtttaattcgttcaatatcactggaagagaactgcccgattaatcgggcggtttccgcagccataaccatacctgcggcaacggcttcgccgtgcaaccacactccgtagcccatttcggcttcgatagcatggccataagtatgacctaaattgagtagcgcacgcagcccattctcttctcgctcatcggcagcaaccacttcggctttcagctcgcagcagcggcggatgcagtaacccagcgcatccatatccagcgccagcaacgcgtcgatgttgttttccagccagacaaagaattcggaatcaagaatgatgccatatttgatcacttcggccaggccagaagcaagctcacgagatggcagggttttcaggcaatcgagatcaacaatgaccgaagcgggttggtaaaacgctccgatcatgtttttgcctaacgggtgattaaccgcagtttttccgcccacagatgaatccacctgagagagaagtgtggtagggacttgaataaagcggacgccacgctgataacaggcagcggcaaaaccggtcaggtcgcctactacaccaccgcctaaagcaataagcgtagtatcacgaccgtgcggtttttccagaagggcagaaaatacctgctccagaacgctgagagatttatactgctcgccatcaggcagaatcacctgatcaactcgaataccgccttcctccagcactgcccggatagaatccagatagagaggagcaagcgtttggttggtaaccagcattacctgatcacccgccttcagcggtttaaaagaggccggatcgttaaacaatcctgcggctatcgtaatagggtagctacgctcccctaacgtgacagtaatcttctccatgtcgcgctcagtgaccttcttaacgtaacttaactgacacccgaaggcataagtagaatgctaaaatcaattactttccagcatgttgatgatctggttagcaacaactttcgcgctttgatcgtcagtgcggatggtgacatctgcaatttcttcgtacagcggattacgttcttttgccagtgcttcaagcacttcacgtggaggcgcatcaacctgtaacaacggacgttttttgtcgcgttgagtacgagccagttgcttctcgatcgtggtttccaggtacaccacaacgccacgggctgacaaacggttacgggtttccttagacttcacagaacccccaccggtcgccagaacaatgccctgtttttccgttagttcattaataactttttcttcgcgatcgcggaaaccttcttcgccttccacgtcgaatacccagcccacgtcagctccggtacgtcgctcaatttcttgatcggagtcgaagaactccatattgagttgctgagctaactgacgaccaatagtgcttttgccggcacccataggcccaaccagaaagatattgcgtttctctgccatgtttttggtattactaagactattcgttaatgataacccgccccgccaatcacaccagcggcgggacctaaactgaaacctcataagcgatagtgcgagatcagacggaaaattatctcagcacttctggtagtttggcaaccgaataaatcgttgtacacgtcgtgggagggaaaccatacgtttttatcggcgtatcaacgttacttaaaacctcggagctcaattcggtaacccttgtaagctaaatacgtcgcagcgtcaaacttagaagtccccaatcacacaaaaagttgtagatcatcatcaagaatagactctttttatctattgcctacccaagtgcgctaagtgttaattaatcggggtgtgatgaaaatgaccaactcccgcctgctctgcgcgttggcatcctgtttaaacaaattgcccagcagagggatattggacaaaaccggcactttatttgcaccctgagtatttttttgctgaaagataccacccagaacaatcgtctcaccgtcatgaacggtaatttgcgttttaatttcctgtttatcgatcgccagtgcctcaccttcaccgcgtttaatcgccattccgggcatattctggctaatttttaatttcagggtaatttttcccgcagccaaaattctcggcgtgacctccattcccaatacggcttccttaaattcaatagtggttcccccgtttttgccattggtgacatgataaggaatatcggtaccttgtttgatgctggcggtttgctggtgagaagtcatcagccgcgggctggcaatgatttccacctgattttcttgctccaaagcgcttagctccaaatccaacaggcggccactaatacgcgccacgtgaaacccggcggtcaacgcgctgttttgaataggtaaaccgacgttaaaattatttattttgagtggggcactttgcccttcactggcaggtagcccccagcgaacacccagttcatgcaggctttcactgccgatggtgacgatatgggcagcaagttgcacctgctgtagtggcgaatccaattctgccagccaagatttcataacttctatcgattctgcggtatcacgaatcagcaatctattggtacgtttatccgccattacccgccccttatcggacagtaatccgccctgcccgttgttcaggctggcggcaacatcttctacgttggcatgctgcaaaatatgcgaataattgctgagtaaatcaggttgcactgcttttctggccttagccgcagcttcatcaaccattaacctttctgaagcttcctgtctggtcatcaccaacaggacattcccttcctgttcggcaaccagattacccatgcgcatgacggtttttaacgcctgcgaccatggaacgttttccaaacgtaaactcaggctaccgccgacgctggcggacgtcaccagattcatatattgataatcggctaaggcttgcaatatgacggataccggggtctgttgaaatgtcagagacaccgagggttcacgagcttcactgcgtgttaataagcagaggataaatagcagagatagccccgcccaacgcaaaaatgttattaaatacaacgtggttaaatacaatattggtaaacacataggcaaacatccttttaataccgttgtttcatcctttattacccggttccattagaaaccaggataccggcggtgacatcatcttgcaggaaccgtccattccgctgtaactcatattgatttgccgcagccctatgtgcgttacgcgccagtgactctgaataaattcgccttcagccaaacgacgccattcgccatccgacttttccaaccagacacgatattcacccggtgcgccgactatccctcgcagcgaccattggctcatagcagcatcagcacgctctcggcaggaaagcgtgatgaccggttggaacggattacggagtggaacaaactcagaagtggctcgactgaccgccatcatcgatgccattaccatcaccgacgctattaatagtaagtttttctgaccgtttcttgtcattctcatcctcctcgtactgccctcttaacctcagtctgaggtttaatcccgacgcttccgcagtaatatgtaaatgctctatcaaaaaggggggataaagagctttgaggctccccagcaagtgaatggctccagagtaatccatactgagaagcccctcccattgcgatactcctaccttatttttgttttttacctctaactgttgccatcgtaatacctggccaccggttgcaaccacccactccccaatatggctgattaaagatttagtcgggttttcagccgtttttagttgctgatacaaatgccacgcttcgcgctgctgtccaagctgatccagcgtgggcatctgggcgatatcctgttgccgctgcgccagagaaattcgttgcgtttcaatgtgttccctttcgttgactctgagcaacagctccggtctgatgagcacggcgtagcacgtaaaaccgataaataaggttgtaatgattagccagagataaagcaccccgcccgattgactcatccagcgtagataataattattcatcgaccagactccccgaaatccagcgaaccttgatcgcaaaacccccattgttttctcgctgctgtatatcgtgaacctgcgcgttatcccaatggtttgcggttttctcctttgtctccgttaatttttcatatagctgaccaattgctggatagtcacgacagatggcatcaaaatccgtcgttttttggtcatgtactaattgtgtgatccaacaatctgtcggcatggattgagacagagtattcaacaacacaagataatgctgagttcggcgggagatttgcctatcgcgatggtgatgttctttgagtttttgcaactcagtcacccgtttttgaattcgttgatgcaacgagtccagcgctgattgacgatgggataatttgccgatctccgccccacgctcaaccctttcataacgcaacaaaaaagtaatacatgccaatatcaaggctgtcatcgctaaatgtcctatcagcaaatttcgccataaacgatagcgtgcctgttgtcggctaacgcgccagggcaaaaagttaacttgatacatcggtgtcctccgggcgaatagccaaccctcccgctaaagcaaaagctccgggcaaaataggaagtggcggctgttgctgtctaaaagcaataaaaggagaccagggaagcgtattctcagggataggttcatcgccaatactgctgtaataaacaccgaaagctggctcaccggttggcgggttcaaccgatgtaattccgtcaaaatagccttggtatcgcttccctcctgcgccgtaatcaaaccatagcgaaaaggcatatccgcagaggtagtccatagccattcccgctcaatacggtgaagtagtagatgtcgaggcggtaatttggcggctacggccatataacgaagcgcgcagggtgaaatatcaatcgcatcaggcatgaagtttgcctgctgcaggcaatcctgccagcgagaaatatcctgctggcgagccgcagtgattaacagctgccgttcatcggcgctatttgtgcggtaatccaacgccagagtttggccactcaaaggaaactgccgagcggcggcgttataaataaactggctgcgctcaggttctctcagccgtttatccgggcgaggaaagctttgctgtaatatgcgctgaaccggcaaggcaatacgtaaagaaatatgtcttggtaattgccggcgtaaatgcgaaagcaactcgctcaacgcctctaaatgttgtaaattcccattcagtaaaacgccgtccggtaatggctgttgccaccaatggcgcagttgccagccatatcgtcgcctcaataccgctaacgcccggacgcagttcatttgaatatccagcccaacctgccatattttctgtgcgcacatcttcatcgacctccatatcgagagagcataaaagaacgtatccacggtgcatggcttgcctttatactacggcgcggttgtttataaactgcccaaatgacattgaatgggaaatctcaggtgaagttcgtaaagtattttttgatccttacggtgtgttgcattttactgggagcagcctcgatatttggcctgtacaaatatattgagcctcagctacccgacgttgccacgctgaaagacgtccggttacaaacacctatgctggtgtatagcgccgatggcgaattgatcgcccaatttggtgagaaacgccgaattccgctgtctttaaagcaaattccgcctgaaatggtgcacgcctttattgcgacggaagatagccgtttctatgagcaccacggcgttgatccggtcggtatattgcgtgccgcatccatcgctttagtttctggccgcgcctctcagggagccagtaccatcacccagcagctggcgagaaacttcttccttagcccggaacggactttgatgcgtaaaatcaaagaggcctttctggcagtgcgtattgagcagttactgactaaggatgaaattcttgaactgtatctgaacaaaatttatcttggttaccgcgcctatggcgttggtgctgcggcgcaggtatattttggcaaagaaattaatcagttaactctgagcgaaattgccatgatcgccggtttgccgaaggcgccgtcgacctttaacccgctttattcgcacgatcgtgccgtatcgcgtcgtaatgttgtgttatcccgaatgctggatgaaaaatacattactcaggcgcaatacgatcaggcacgcagtgaacctctagtcgctcattatcatgcgccagaaatcgccttctcagcgccttatctggctgaaatggtgcgtcaggaaatgatcaaacgttatggcgagaatgcctataccgatggttatcaggtttacaccactatcaccaaaaaactccagttagccgctgtggattctctacgagccaacgttttggcctatgacatgcgccacggttatcgcggcccgtcaaacgtactgtggaaagtgggtgaagccgcctggacgcagcaacagattgtcgattctttaaaaactctgccggtttacggcccgctgcgccctgcggttgtgactcagacgacggctgaacaggcgacagctatattagccgacggcagcagcgtcacgttgccaatggccgggatgcgttgggcgcgagcgtttaaatccgatacggctcaaggccctacgccgaaacgcgtgactgatgtagtacaagctggacaacaaatctgggtgcgtcaggtcggcgatatctggtggctggcgcaggtgccggacgtgaactccgcattggtttcaatcgaccccaataacggtgcaattaaagcgttggttggcggttttgactttaaccaaagcaagtttaaccgtgcaactcaggcattgcgtcaggttggttcgaatatcaaacctttcctgtataccgctgcgatggataaaggcttaacgctggcgaccattctcaacgatttgccgattactcgttgggatgccggtgcaggcactgactggcggccgaaaaactccccgccgagctacgatggtccaatccgcttacgtcaaggcttaggtcaatcgaaaaacgtcgttatggtgcgagccatgcgcgccatgggcgtcgattatgctgcggaatatctgcaacgcttcggtttccctgcgcagaatatcgtacattccgagtcgctcgcgctgggttccgcgtcctttactccattgcaggtcgcgcgcggttacgcggtgatggcaaacggtggttatttggttgacccttacttcatcactaaaatcaccgatgaagccaataatgtcctgttcgaagccaaaccgaagattgtgtgcaatgattgcaatttgcctgttatttacggcgacacgcagcgttctgtggtgctttctgacgacaacgtagagaacgtggcaacctcgcagaataataccgcaagcaccgttccgatgccggagctagagcaggtttcgccgtctcaggttaaacaagatagcgatcagcagtatgcaccgcacgttatcagcactccgctggcgttcctgattaaagatgcgatgaataccaacatcttcggcgagccaggttggatgggaaccggctggcgcgcgggccgcgatctgaaacgacacgatattggcggtaaaactggtactaccaacagctcgaaagatgcctggttctctggttatggcccagataccgtaacgtcagtgtggatcggctttgatgaccatcgacgtaacctcggccgcagtaccgcttctggcgctattccagaccagatcgccggcggtgaaggtggagcgaaaaccgctcagcctgcgtggaatgatttcatgaaagtcgctctggaaggtatccctgaacagaaaacaacgccgcctccgggcgtggttaccgtggtgatcgataaacgtaccggcaagctgtctgacggcggttcgggtagccgacctgagtactttatcgaaggaacgcagccgacggaacacgcggttcaggaagtgggtacgacgctcatggacaacggccagagtcaggaattgttctagttgggagccgcgctagccggaaacagttttaacggtattcgcgaataaaaaaccggccagtcttcaggattggccggttttttttatcattccaaaagagaaagttaacgtgaaagagtcgaattaaagaaggcctgagcgaggaataacgcgctcacattacgcgcctcattaaaatcaggatctttcagcaacgccatcatattcgcaatcggccagcgcacctgcggcaaaggttctggctcatccccttccagactttgcgggtacaaatctcgtgcgacgacaatattcattttgctggaaaagtaagatggggccatcgtcagcttggtcagataatcaaaacgcttggcaccaaagccaacttcttccatcaattcacggttcgccgcatccagaacttcttctcccggatcgattaaccctttagggaaccccagctcataggattcaattcccacggcatattcgcgaatcagcaacagatcttcgccgataatcggcacgatcataaccgcttcgcgattggaggggcgcattcgttcgtaaagacgacggacgccgttactaaactcaagatcgaccgcctctacgttaaataagcgggagcgggcaaccgtttcgacattaagaattttaggtttttgcaggtgtttcatgatagccccgaatgaataattcacctctaatatgacgttttattagggcgtaccagcctgccaaaatgtgcttcaggccaatcttttcctgtccagaataatgctaacgtcttgggtgcagggatagttttaaaacttgatcacattgtgcgttaatgagaacctttatcgcaacgccgttagatataatttacccgtttttaacatgacaatcggtttagtcaaaatttagtcggttagaaactggcctatttaggcagcaagaacgttaaagtatgaagatgaaaataggaatatgctgatattacccgcgtattacccctgttatctttgtcgcctaacaggcagttgaagagcccctacaccagatcatatcgctgagcagaatgccgctatacccgctcacgaaataactcttccgtatgcctcgacacgatttttatgcataatatgcattctttcatagagttaacgaggtttggtagcactcggatggggatgggatgagcacaatagtgttgatattggccttactcttgaccagccttgtcgctgttgcattgctatggtggttcaaatatcaccaaatctctgccgttcccgtggcgctcccgtttgtcaaacccacgcatcgtacccttacgcctgaagaacgcgtcgccgtcgagaattacctgcttaatcaatccgaaaatggcacctttaaaaagctgccgggtctggattcacatctggatcaagggcattcgtcctcgtctaacgagctggcgttgatcccggaaagcgataatgtctatgccgtcacccgcgctattacccgctacggcgtggctagcgatgaaccgaataaatggcgttactaccttgatgccaccgaagtgcatttacccccgttctgggaacaattcatcgcgcaggataattacgtcgaagtcattcagacaaaaactatcccattggtgatctctttaaatggtcactcccttaaagatcacacgttggaagccccaacgccgcgagtcgcccagtctgcgccacaaaatgcgtctatccgtaaagaagacagcgaacacgtcgccttggtcaatattcgcaaggaaacgccggaagaacatgcgatttacgggcctaccggcctgagagaagcggcgactatctgtttggctttgctgcttctattcctcagccttattagtcctggggtagtattgccatggctgattcttgtctctatcgccctgctttcctgggcctgctggaagttattccgaccactttcagaatcggatttaaaggaagttcattgcctgagtggcacgccaaagcgttggggattatttggcgagtccaatcaagggcagatgaataacatctctttgggcattatcgacttgatttatccgcctcactggcaggcttatttcgcccacgatctgggtaagaaaaccaacgttgatatttatctaaatcggcaggtcgtccgtcagggacgctatttatccctgcatgatgaaatgaaaaattttccattgcagcgctggggcaaaaacctgacgttaatgctcggttcattagcgattctgatattgctggtcgtttatgttccgctcggtctgccgctaaaactcagcatggcgtggattcagggtgcacaaagccagcaggtcactagtgtacaagctttggaaaagatgccgcttcgcattggcgatatgctgaaagctcagggaacgggtatgtgctatgtgccgcctaacgctctcggcccgcataattttgcttttacgcctttcgattgctctagcatttactggaataccgcatctacgctaccacagcctgagtcggaaactattgaaaaagccgctgcactgctggcgacggtcaatcagcaattgcacccgcaggacagcagcgatcctaacgttaacccacagttagcgacagcgattgaaaagtccgggatgattctgctgaataacttttccgatattgtactgaaaaccaaagagttatgcagaagcgaagccgattgcgtacgtctgaaaaacgccttggtcaatttaggcaacgccaagaactgggcggcgctcaccaaaaaagcacagtctggcgcgctcaaaggtatgaacgtgttattacgtccggtcagcgccgatgcgttggaaagtttggtgaataccgctacctcttccttcgtttaccgcgaaactcatctggctaccgaggcattaaatagcccgccgccgggcggtttcctgatcagcagcgatgaaggcaaacagctggtcaaccatcctattcctgccgttccgctgtttgattacagtgcgttagagcagtggcgagaacttcagcggctctctggtttgctgctgaataccccgtttaaagctgaaggagtcatcaccagcattaccgttgatgccaacggtacgcgtcatgttactttgcatagcgaaccggacgttatcacgctcagccgctatttaggcaccagcctgttgttattcgccttgattatttgcctgtccgtcaacggctacctggtcattaagcgtatgcgccaaaatcgcacccgcatggaagatattcaacgctattatgatagctgctttagcactcaccttaccgctacgccttatcttcgctaagcgccagaatccgcctacgcagcatcagccacgcgcagaccttgtcattttggtatgctaggctaaatattatctgctaaatcgtccgtcgctgttccccctcaaacagccagaatgcctgcttattttattggagtgaccatgccactgaatgttaactggcaagatatcgataccgtattattggatatggacggtactttgctggatctggagttcgacagctatttctggctaaaactggtgcctgaagctctaagccagcagcggaatatccctttggagcaggccaaggcaattattaacgatgaataccacgcggtgcagcacaccatgagctggtattgcttcgattactggtgccaacgactagatctggatatttatgccatgacgacgcaggtcgggtcgcgcgccagtttgcgtcaggatacactgccgtttttgcaggaattacgcgactccgggcggaaaaccattttactgaccaatgctcatccccatagcctgaatattaaagttcagcataccggtctcgatcagcaccttgatttgttactttccacccatatatttggttatccgaaagaagatcagcgtttgtggcaggccgtggctcaacatatcgattttgaccccgccagaaccttatttgtggatgacagcgaagccattttggacgcggcaaaaacctttggtatccgttactgtttgggcgttgaaaaccctgattcaagctgcgcgggcaaagtgtttcaaagccatcccgccatcagcgactatcgccaactgttgccagccattcggcaccacagcgcggcttagcagacaggagattctgtgaaagaaaaatccgctcccgatgacgccgttcgtctggataaatggctatgggctgcgcgtttttacaaaacccgcgcaatggccagagagatgattgatggcggtaaagttcattacaacggccagcgggggaaacccagtaaactggttgaattgaatgcggaaattcggttgcgacaagggaatgacgagcgcacggttcgaattctgtccatacacagccagcggcgcggtgcggcggaagcgcaggcaatgtatgaagaaacggaaaccagtatcgccaaccgggagaaagtagctcaggcacgtaaactcaatgctctgaccatgccccatccggatcgacggccggataaaaaagagcgtcgcaatctgatcaaatttaaatacggcgagtcggaataaccggctgcttttaagagagaaaactatgtctaatcacgaccaattacaccgctatctattcaaccatcatgcggtacgcggcgagctggtaaccgttaatgaaacttatcaacagattatcgcgaaccatgattaccccgcgccggttaaaaagctgctgggtgaactgttggtcgctaccagcctgttgaccgctactctgaaatttgacggcgatatcaccgtacagctgcagggcgatggcccgttgactctggccgtaatcaacggcaataaccagcaggaactaagaggcgtggctcgcaccaacggcgaaattgccgaagacagctcgctgaagcaaatgattggtaatggttatatggtgataaccattacaccagctaaaggtgaacgttatcagggtgttgttggcttggaaggcgacactctggccgaatgtctggaaagctatttcatgcagtccgaacagctaccgacccgcctgtttatccgtaccggtgaagtcgaaggtaaagcggcggcagcgggtatgctgttgcaggttctgcctgccgaagagcgaaatgaagacgaattcgaccatttggcgcagctgacaaccactatcaaggcggaagaactgttcaccctgccagccaatgaagtgctgtatcgcctgtatcatcaggaagaagtgactatttatgatccgcagaatgtcagcttccgttgcacctgttcccgtgaacgatgcatggacgctttagtgactctgcctgttgaagaagtgcaggaaatgcttgagcaggatggtcaaattgatatgcactgcgaatattgtggcactcaccatatttttgacgctgtagatatcgccaatttgctcagcggaaacagcccgtctgacgatcaaatccattaattattctgttctttccgggcacatttactgtgcccggtgattcctgccgtttcacgcttgctataattcgtgtgctatctctcataacctagctaaaaataggtcatttattaaaatctttgatagcaatcgctgttaatcgaggctgaggatttacaatcggtggcataaaaataagacgaccctaggagttagacatgagtgttaaaggaatcaccccgcaagagctcgccgattatggcatccatagtgtaagcgagattgtttacaaccctagttatgagcttttatttcaggaagaaaccaagcctgatctgcaaggctatgagcgcgggactgtcaccaatttaggcgctgtcgccgttgataccggcatttttaccggccgctccccgaaagataaatacatcgttcgcgacgccatcactcaagataccgtgtggtgggccgatcagggcaaaggcaagaatgataataaaccgctgagtcaggaaacctggacccagttgaaagggctggttaccgaacaattatccggtaagcgtctgtttgtggttgatactttctgcggtgcgaacgctgatactcgtctgaaggttcgttttattaccgaggttgcgtggcaggcacacttcgtgaaaaacatgtttatccgccctactgatgaagaactggccaattttgagcctgattttatcgtgatgaacggcgctaaatgcacgaacccgaactggaaagagcagggtcttaactccgaaaactttgtggcattcaacctgaccgaacgcatgcagctgattggcggcacctggtacggcggcgagatgaagaaaggtatgttctcaatgatgaactacctgctaccgctgaaaggcattgcttccatgcactgttctgccaacgtgggcgagaaaggcgatgtagcgatcttcttcggcctgtctggcaccggcaaaaccaccctgtctaccgatcctaagcgtaaactcatcggcgatgatgaacacggctgggatgatgacggcgtgtttaactttgaaggcggctgctacgccaaaaccatcaaactttccgaggaagccgagccagatatttatcacgctattaagcgagacgctctgctggaaaacgtcatggtactggccgatggtaccgttgattttaacgatggatcgaaaacggaaaatacacgagtttcctatccgatttaccatatcgaaaacatcgttaagccagtatccaaagctggccacgcaaccaaagtcattttcctgaccgccgatgcgtttggtgttttaccaccggtatctcgtttaaccgctgatcaaacccagtatcacttcctgtctggctttaccgccaagctggccggtaccgaacgcggcgtaaccgaaccaacgccaaccttctctgcctgcttcggcgcggctttcctgtcgctgcatccaactcagtatgccgaagtactggtaaaacgcatgcaggcggcgggcgctcaggcctatctggttaacaccggctggaatggcacaggtaaacgtatttcgattaaagatacgcgtgggattattgatgccatcctgaatggcgatattgataaggctgagacattcaccttaccaatatttaatctgacggtaccgacggcgttgccgggcgtgaatccagagattctggacccgcgtcaaacctacggcagtcttgagcagtggcaggaaaaagcggaagatctggcaaaacgcttcgtcaccaacttcgataagtataccgatacccctgctggcgcagctttagtcagcgccgggccgaaaatctaatctgttttacttatgcaaaagggcacgatattcgtgcccttttttgatcttgctgattcttaatgatattagtcgctcacaccgtcaaccgtgtttgcccggtgccaccgatttcacgtctaagggcaatggcaggtaagcgcgaatgcacagcccgcccttctcactggtgccgatatccagcatacctgagtgagcatcaagaatacgctgtacgattgccagtcccagaccggtgccgctggtgctacgagcgctatcgccgcgaacgaatggctggaacagatgcttcaattcttccggtttgatacccggcccatcatcttccacttggaaccaggcgcgctgtaactcagtgccgctgcttacttttatccagccattaccataacgagctgcgttaaccaccatgttcgccaacgcacgtttaatcgataacggatgcacttcgaccttcacttcgccgtcgcataaatctgtttcaatttcccgctcatatccgctttctgccgcaatgacttcgcccaaaatggcgttcagatcgcaggtttccgtcggcatttcctccccggtgcgcaggtaatcaataaactgttcgatgatggcattacattcttcaatatctttattaatggattcagagagataaccatcctcttctgccatcatttccgtcgctaggcgaatacgggtcagcggtgtacgtaaatcatggctgacgcccgccatcagaagcgtgcggtcatctgccagcagctttactccggaggccatttggttaaatgcccgggttaccgagcgcacctcagatgcgccatattcccgcagcggcggcggaatatggcctttccccacctgtagcgccgcgtgctctagttccaccaagggccgattctgaatgcggataaacagccaggctccgccgaccgccagcagcataatcgctagcgtataacggaacagcggcgagaaatcaccctgatgaatttcagtcagaggaacccgcacccagatgtctggcgatagccaggttttcagccagacgaccggcgagtttttattaacctcaacccgcacatccgttggccctccaagctgctgggccatttgatcgctgagaaacttgtaatgctgagcccaacgcaggccactctcctccgccgcagcattggtatacaaagaaattcccaactcacggtagatttcacgccgaaaagcgggcgggacctccagtagcgtgccgtcttccagttgcagccggtcggtcatcagcatacgaacttcgtaagccagaaccttattgaactgctgcaaactaggcaaaatggcaaagtttagtaccactaaataagttgtgaccaaactgacgaacagcaaggtcacaatcaataacagggtacgggcaaacgagctacgcggagaaaagcgccatcgcctcatgctttactgccgtccggtacgaatacgtagcccaagccccaaacggtttggatataacgcggatgagcaggatcttcttccaccatacggcgtagacgggagatttgaacatcgatggaacgttccatggcgctgtactcacggccacgagccagattcatcaatttatcgcgggataacggctcacgcggatggctcaccaatgccttcagcacggcaaactcgccgctggtcaatggcataggttcatcttcgcgaaacatttcgcgggttcccaaattcagtttgaatttgccgaaggagataatcgcctcttcctgagaaggtgcacccggtagttcattggcctgacggcgcaacaccgcacgaatacgcgccaacagctcacgcgggttaaacggcttaggaatatagtcatctgcaccgatttccagaccaacaatacggtcaacttcttcgcctttcgcggtcaccataatgattggcattgggttgctctggctacgcaggcggcggcaaatagatagcccatcttcgcccggcaacatcaggtccagaaccatcaggtggaatgattcacgggttagcaagcggtccatctgttcagcattggctacgctgcggacttgaaaaccttgctcagtcaaatagcgttccaaaagcgcacgcaggcgcatgtcatcatcgacgaccagaatcttgtgattctcttgcattttagtactcccaaaggctgtattgcccgacctgaatattgttagaaaaactcacgctaacagacagctatttatggtatatattctagtcgaaattgttacaaagcttattgttctacctaataatcaacacttttcgtcaaatggccggtaccgaatctctaatatccagtaggttgcctcgccgttgggtgtctgaaccgtgatttcatcatctacctgtttaccaatcaaggctcgcgccaccggcgagtcaattgagatccattttttggccggatcgaattcatctgggccaaccaatcgaaaaaaccgctcttctcccagttcattttccaccctaacccaagcgccaaaataaacttttccttcctgacgcggatcgggatcgacgattttcaacacatccagacgtttggataaaaaacgcacccgacgatcgatttcccgcaggcgttttttcccataaatatattcggcattttcagaacggtcgcccattgcggctgcttctgaaactgcctgcgtcacccttggccgttcttctcgccatagatattttagttcgaggtccagagcctgccagccttcgcgggtgatgtaattacttttcgacattctcttatccactcaacacgggttgggtattcagtcatccaatataacgtaacttatcatcaatacgttgtcttccctcagattacgccaggttgtttactcgagccatgcctcaaactttacctatctcgacggtcataacttcacattaagacagactgtgttgactttttatacggcgagttataaagattaatacgcgcagaaaagcgctcaagtaacattgattaacatgatgttatatatggatttatttaaaatcacggaggattttaaaatggaaattattattcttgaaaccaagctaccagagcagaataaacctcgaccagcagccgaacaataacggtcaagacctccctaaaatattagggaggttagctcatactgacgtttataaaacaatttatgatctggagagcgaatcatggaaggtatcaacaagcctttattactgcccaatacggtagttttagacaagacggcctcgcgagcgggagtgacgctaactatcgcagacctcaatcaatgggataacttcaaacgcctgcttgaatgctgtgacggcacgcaaaccccacaacaaatcgctacacacctatcactcgacatcaccaccgttaatcatactttggcatctctggagtccgcaggcttcatctggtgtctgccagcgtatcaggcgattcctacgccactttttttgacggaattcaaccgctggctgcccatttgggtgcataagatgtatgaccaacagatatggcaagatttgtatgatggtaaagaatcgccgtcggtgcttatcggctgggcgcaggaaaatatgcattacactcgcagcgttatgtcgcatatgcctcgggctattcactatgccgatgaccaaatcgggcatggcatccaatttcgtcatctcagcgaagagtgggatcattaccggttatttatggccgcttgccacgatgtgggtatcgatcaggctcagttggatcaaagcccgcccctagccagtaccaccagcattacgcgttttatggccaatgtggctcaaatgggaacgctggtgtacaacgcctgcgaagccttgctggaagccaccacccaaaacgggcaatcggtgatcgatttctatcaaacggccggcgagcggctagaactccctcaggcattcaccgataagctgattcatcatttgatggcagatcagaagtttgaacatatcgatatcttcgaacacctactggaaggtcattcgacattaccggcacagaaagttactcagattttcactagctgtcatcggctcgccaattggtttgagatatggcatgacgatatttatcggcattatcactcattgccgctttctggcgctcagtgtgtttctacatcatccgaccagctttctggtacccactacgcaagttcaaccatataggaaagggttaactttatggataataccgcgacagccccagcactaccccttctgactcctaaggacttatcctttcccgctgacgcttggaacatgattcagcccgaagagatgaatgaacagtttatcgccgtgacgacttcgctgcgtggctggctgaaaggcggcgcaatgagcgaatactatggattaacgcctcactgctgcaaactcgccgttgaaatgtgccacctgctgtatggattagataaagcgctggtacgatgcgctgcggaaaccgaagataagcagcttcaggagctttttattctgcatgctttccacgctcatcgaatgaaaaaaacctgggataacatttgtcatgagctgacccaaaaacctctggctgaactggagccactgacctcaaccttaatgttgcagctcacactggagaatatcgccgctaaagatcctctggcttttgcctacgccatcgatctatttggatcacctggctacatcgaatctatcgaaccggtagtggcgttctttagcgagcttttggataacccggaaatcattgctcaccttgctacgtggaaatcagagtctattgataatgacacctctttcgccagtattcccctgaccaaagtctacggatatccccttgcgggcagctatggcaaagcctgttgcgattttatcggtccgcgcctgcaacgagatatcgataccagcctgattaatctggcggctctgggggatcaatttcatttgttttatcgcggtgtgcaggttttttacgtcgagaaggcattctccttccctcaattgcacatgaattggttacacagcgcctaatgccaccagcaccacaatcggtgaatactggagaaaatcatgctgttaaaagattccgttgtggttgaatatgttcgcgaacgagttttgcgcctcacctcccggctacaggtagttgagctggttcatgatgatatcaatgcattttttgtcgaaatgctgtcgagaaaccgagacccagaatccgctttgatagaaacagggtgcagcgccgatttcagccgagactttatggcattcctgcataaaaacgttctgctctatgccattccgattaatgctgattatattgctgccgcagatgccgctgacctgataaacaacgagctgaatcattgggcggatatactttacttcgacccattctggtcaacgatggaaaacccgacggcagcgacagatctgaatacgctttatgcttgggcaatagaaaactaccaccatactcacagtgtgatccgacatttaggagccgcgctatctcatactcagaatcaattggtcgcggacaaactcattacacatttgtctgaggaatgggatcacccttatctgttcaaacttagcgcaatacgttttcgccgtgctcatctgctacccgcactagaagaaacgctgttgccgttaccctgcactcagtctctttgcgcgctgttgcaattggccgccagacgaggttgtttcgcctacaaaagctgcgtagccgtactggaaaacaccgctcgacgagtcaatgaaacccgaacattttatcgaaatattgccgagcgaaacgcgttagattatagcgtggttgaacccttcgttatccacgcagaaacggatgaaaactatgatcatcttaattcgttaagtcagttttctgctcacagtccgcctttagccgtagcttgcgtggaagaagccttagggttggcttatcgttttgcagaggcactcaatctgtggcaacgccatatgatggatttgtacctcactcgctctttaggtgaaggccatcgaactcgacaaacagcctaggagtggctgggtatatgccgttgtggataaatactcggccgttactatcaatctctattatttttgccggatcgtcattggcctattacatgctgatgacgactctcgccacttatctctatgattatctgaacttatccgtagccaccgttggcaccatcatttttggctacgtttttacctcacgtctggcaaaggtcgctttggggccgtggttcgatcgattaactctacgcactagcctgatgctttctttaagcattgccgccgtcggttttttactggctgcatcagataagctgataggtatccttgctccttggtgcctctgtattgctggcgtgggcgtttcttccatcgtattgctaacccactctgctatcgcgcgccaaaaacagtcttcatccgacgcttctcacgctcctgccgattattcatttatctacgttcttatgcatggctcggcattaatcgcccctgccattggttttaatatattgctcaattatcctggtcagctgtattgggttattgctagtttctatctcgctctgctgctattttgccggttttttctctctgaacctcaccaccagtcagttgagaaagccaaaccgatcgttatagattttctgatcgccttcaaaaaacagcattactgccgattcttgctgatcaatagcctgctatggatgctttatgctcagcttttttccaccattccactctacgtgcgcgaagtattaggcgcagaaagccatatcacgcggttctacatggtcgaagccttgtctgtgatggtgctgcaatactgggtcagcgcccatattaacccgcggattcaggcttattttcccaaggtgacattagcggcgttttctctatccttcctgctgatttactacgctcataacatgtttttcatcctgctggcaggctgtatttttgcctttgcactaatggtatttatgccgtgctcaaacgcggctaatgcctcattcgccgagccagggcgtttcgctacctacttcgggctggtatcactgtctgccactctgggagattcgctcggcagtatattgggaatggtctgctttgatttgttactgcaaaacgagatgctaaaacactactttctctggctcgccggcattaccgcagcactggcaattctctgtcgcaatccgtataactgtcctttctgatttccctattcatctatcgaactgataccagacttatgaatgaaccactgagccgcattattgcaagcgaactacaggcccggccggagcaagtcatctccgctatccgcctgcttgatgaaggtaataccgtgccctttattgcacggtatcgtaaggaagttaccggcgggttggatgatacccagttgcgccagctggaaacccgtctgggttatctgcgtgaattggaagaccgccgccaaaccattctcaaatccattgaagatcaaggcaagctaactgagcaactcgccggtgccataaacggcactatgagtaaaaccgagctagaagacctttatctgccttataaaccgaagcgtcgcacgcgcggacagattgcgattgaagccggtctggaacctctggccgatagcttgtggaacaatccgcagcaagagcctgaatccgttgccgccgcctatatcgatgctgagaaaggcgttgccgataccaaagccgccttggatggcgcgcgttacatcctgatggagcgtttcgccgaagacgccacgctgctggctaaagtgcgtcagtatctatggaaaaatgcgcacctcgtctcaaaagtagttgaaggcaaagagcaggaaggggcaaagttccgcgattacttcgaacatcatgaacctatcgctcaggtaccttcgcaccgcgcattggctatgttccgtggccgcaatgaaggcgtgcttcaactgtctctgaatgccgatccgcagtttgaagaaccgccgcgtgaaagccagggcgaacagattattatcaatcatctggatctgcgcctgaataatgcgcctgccgatgcgtggcggaaagccgtcatcaactggacatggcgcatcaaagttttactgcatttggaaaccgaattgatgagcaccctgcgcgagcgggcggaagaagaagccatcaacgtgtttgcccgtaatatgcaggatttgctgatggcagcacctgccggcatgcgcgccaccatgggtctggatccaggattacgtaccggagtcaaagtcgccgtggttgatgccaccggtaaattagtggcttacgacacggtttaccctcataccggtcaggccaccaaagccgccgccactgtcgcggcgctatgcatcaagcatcaggttgaactggtggcaattggtaacggcaccgcgtctcgggaaacagagcgcttctttaccgaattgcagcagcaatatccggcggttaccgcacagaaagtgattgtcagtgaagccggagcctccgtgtattccgcatctgagctggcggcactggaattccccgatctggatgtctctatccgtggcgcggtgtcaattgcccgtcgcctgcaagatccgctggccgagctggttaagatcgatccaaaatctatcggggttggccagtatcagcatgacgttagccagagccaattggctaaaaaactggatgcggtggttgaagactgcgtaaacgccgttggcgtggatctcaatacagcgtcggtgccattactaacccgcgttgccggtctgacgcgcatgatggcgcaaaatatcgtgaactggcgtaatgaaaatggtcgtttccgtaatcgtgaacagctattgaaagtcagtcgtttggggccaaaagcctttgagcagtgcgccggtttcctgcgcatcaaccacggcgataacccgctggacgcctcgacggtgcatcccgaagcctatccggtagtcgaacgtattctggctgcgaccgagcaggcgttacaggatttaatgggcaatccaaccgtactgcggaacctgcaagccagagattttactaccgagcgtttcggtgtgccgacggtgacagatattcttaaagagttggaaaaaccgggtcgcgatccgcgtcctgagtttaaaaccgcaaccttcgcagacggcgttgaaaccatgaacgacctcaccgtgggaatgattctggaaggttcggtgactaacgtcaccaattttggagcctttgttgatatcggcgtccatcaggatggtttggtgcacatttcttcactggcagacaaatttgtcgatgacccacataaagtggtgaaagccggcgatatcgtcaaagtgaaagtaatggaagtagatttacagcgtaaacgtattgctttaacgatgcgtttagacgagcaaccgggagaaaccaatgcccgacgcggcagcgctgacaatagtgctaaacctcgtcagggaggacgcaatagtcaggattctcgcgatagagcgccagccaaaggacgcactgctagcgctaccggcgcaggcaacagcgccatgagcgacgcgctagcagcggccttaggcaaaaaacgctaatccaaccgcgccgctgactcttgtcagcggcgtttttccttcccagttcgcgccactctctcccttttctcactgctattctgtgatatgcctttcataatcttttggtctataaatatgaaattttatattcatagatgattagcagaagctaaacatctattttctgagtccatcatattttttctatttgtgttggacctctcaaaataaatgaggcgactgacgcaaccctaaggatttattaagaaacataataaataagattaactaaatataaatccagatattaattgattcaaatcatggtgaattgcagatagtgtaaattagaattattatccttaaggctggtcgtatatgtaaattgaaatacaattcattaaccattttaaccagccattctcgtttgcgaacgccacactttggtgctaaaaaaagaagatatcggcctagagcatattattcctaatgtcgtaacgaatatttaccattaggcttttgatcgctgttgaatacgataacgattctcactatcattattgtgtctattatcgcttagcgctaccgcccgcagttcaatggctagcgctaatagcccgattcctctggcagataatgtgatattcgcacctggcgttgagctggttagtccgccattttgttgccgataatgtcatcttttattatcacgagggttatatgcatcttcttcctcaacgcgcttataagattttgggattctctcctgaaatcagcccggcttatcgacaaaaattattgtcgctcggcatgttacccggttcatcatttaatgttgtgcgtctcgcaccattaggcgatcccattcagatagaaactcgccgcgttagcttggtcttgcgtaaaaaagatttagattttctgaatttggacctacagccttaatttttaggttcctttcattttattttctctgcggctcggttgggtatatcacctggtctagattaattttaatttactcatattacgttggatcatgaaagcactcacaatcggcttaattggcaaccccaatgcaggtaaaactacactgttcaaccaactgaccggagcacgtcagcgcgtaggtaactggtctggggtcacggtagaacggaaagaaggtcatttttccacggcgcagcatcaggtgactttggttgacctgcccggcacctattccctgacgaccatctctgaacaaacctcgctggatgaacaaattgcctgtcactacattctcagtggcgaagccgatctgttaatcaacgtaatagatgcgtcgaatctggaacgcaacctctatctgacattgcagctgctagagttgggcattccatgcattatcgcgctgaatatgctggatattgcccaaagtcaacgaatcaaaattgacgtggatgcgttgtctaagcgccttggttgcccggtcattccactagtttcgactcgtgcaacaggtattgccgaactgaaaaccagcatcgaccaatatcagccgaacaccgataacgctctggtgaactatccgccgctgttgctggaagaagttgaaaaactgacttcggccatgcccgatagtctgccaatgcagcaacggcgctggctggcgttacaaatgctggaaggtgatatctacagtctggcacgctccggcgtttcgcccgctttgctggcagagtcccgccaacggcttaaagatcaacaacatgaagatcccgaactggtgattgccgacgctcgttaccaaagcatcgcaacgctgtgtgatgcggttagcaacgcgcaacaggctgaacctaaccgtctgactcaaatgctagataaagtgattctgaatcgttggctcggcgtgccaattttcctgtttgttatgtatttgatgtttgtattggcgatcaatatcggcggggcgctacagccaatttttgatatcggctcatcggcgatatttattcagggtctacaatgggttggctataccctgcacttccccgaatggctgacgatatttttagctcaggggattggcggcgggatcaacactgttttaccgctggtaccgcaaatcggcatgatgtacctgtttctatccttcctcgaagattctggctatatggctcgggcggctttcgttatggaccgcctgatgcaggctctggggctgccgggtaaatccttcgtgccgctcatcgtcgggtttggctgtaacgtgccggcaattatgggcgcacgtaccttggacgctcagcgcgaacgcctgataaccgtcatgatggcgccctttatgtcctgtggtgcacgtctggctatttttgccgtcttcgccgccgctttcttcgggcaggacggtgccagcatcgtattctccctgtatttgctcggcatcgtggtcgccattcttaccggactgctactcaagtacaccattatgcgcggcgaagcctctcccttcgtgatggaactgccggtttaccacgttcctcacttaaaaagcctgctgctacagacctggcagcgcctgaaaggctttgtgctgcgcgccggtaaagtcatcgttatcgccagtatttttattggtggattgaacagctttaccttcggcgggaaagccgccgatagcattaatgactcagctttggcctcggtcagtaaagtactcacgccgttgctgacgccaatgggcgtacacgccgataactggcaggccaccgtgggcttggttaccggggctatggcgaaagaagtcgttgtggggacattaaacactctgtataccgccgagcaaattaagaacgaaccttttgatgcagaaggctttaatttgctggatgaactcggcggagcggtaaacgaaacctggcagggattaaaagataccttcagcctgagcgtactttccaacccgatcgaagccagcaagggtgacggtgaaatggaagctggttcaatgggcatgatgagcagcaaatttggctccagcgtggcggcttatagctacctgatctttgttttgctctacgttccctgcgtttccgttatgggcgcgatcgcccgtgaaaccagccgcggctggatgaccttctcaattctgtggggactaaacgtggcttactcactggcaacgctgttctatcaggccgcgacctttagcagccatccacagcaaagtttgggcattatcgcggcggtcatcgtctttaacattttgatattcttcggcctgcgccgtgctcgcagccgggtaaccttccgcctacagaatcgacagcccgcgagtggctgccaaaatggcggcggtcactgtcattaatcagggagaaatcaattatggccagtttgatgcaactgcgtgacacccttgccctgaacggctgcatggaagctagccagctaagtcagcagttggccgcaccgctacctttggtagaagctatgctagaacgactgattgctatgggaaaactggagcgtatcgagcaggataacaccggatgcctgagcggtagctgtaaaagctgcccggaaggccagaaatgcaataccgtggtgtatcagttaaaaacccactaaagaaaaaggtgatgtcagcaatggcatcaccttattgttattcaacgataattacttataaacatctgcggtagcgttaaattttttcttttcattttccgagatgatgacgtagtacttgccgcctttttcgtcggctttagccgacaaatcctgtttcacatccagtggagacatggcttcgccagaagaagaaatggtgccaattttttcgtagcctttgtctttcgcttcttgtcttgtaatttctttcgctgccaaagcgccaaaagacaacccaccaacaaccagagcaaccgctacatttttcaataatttcatggtaatacctcgcattaaagtgataggtgcgtgtacagaaaaattgagccaagtaataacgatatgagttagatttgatttgtattgatgcgcctacaggaaaggttcatccccagaggaagggttacagaaaaatcggcgcgatgaactgcccgttctgtagcacctgatctaacgcttctaattattgagtagattcagtatttagccaataaatgaccaatatatttcgatcccgtcgaggtaatggcagagatagcccttctcccgacggcgtgactccattaagaactctgagcagtctcagcggcaaaattaatgattaactctgcaaaatcatcagggtgagagataaatggagcatgagccgagcctttcatcactacagagcgactttgaggtaaagcatcatccagcaacgcggcaactttgcgcggcaccagaccatccagataaccataaatacgcagtaacgggacagaacaagcagccagctcctgacgtaaatccaccgtgcgcaaaatttccaggccaccggtcaatacttccacctcaggcatttgatgattcaataccaccgatttcagcaagcgtgcatcctgacgggcgctttccgtccccagcgtttgtaacgccaaaaaacgctcaacggtgcgttgaaaatcttccgttagctgctgttggaaacccgccagcacttctgggcgaatccccggccattcgtcatgggcggtaaaacagggggaagaagagaccgtaatcaggccgctcacgcgctccgggtgactcagggcaatctgactcgccaccaacccgcccattgaccaccccagccacagcgccttcgctggagcctgtttctgtacaatatcagccatctcatccagcgacatcgcaccataatctcggctgcgtccgtagcccggcaaatcgaccagatgaatacgaaaatgcggggcaagccgctcaatcatgcaacgccacacctcggcgttcagtccccatccgtgcagcagcacaagatcgcgatcgccttcgccgcaggtctgccaataaagctttgtcatcagttattatcctgttgccttcaacatcaaggaagatgcctatgctaacaatcaccgggctatgttggctatgccgacaaccgttacatctggcttttcacggaatttgctgtttctgtttacgtcatttacccatgccgccaccctgctgttttcgctgtggcttgccctcatcacagcccgaactaccctgcggtcgctgcctacagcaaccacggccatggcagcggatactgttcatcggggattatcaaccgccgttaagtacgctaataaaaatgctgaaatttaagggtttttcacaattagcgccggttttggctcgcttgatattcttacgctggcgaacgataaaatacgccgatagtgcggcaatcaagcctcagcggttgatcagcgtgccgttacatcaccagcgctgctggcagagaggttttaatcaaagcgatttattggcgcgacctttggctcgctggctaggctgcgattatcatcctgacagtctaaaacgcctgtctgccgcgccaccgcagcggcagctcaccgccagcgcgcgccggaagaatctaaggggaatatttcgccttaccgaagatttttgcggtcagcacgtcgtattactggatgatgttgtgacaacgggcagcacggttgccgagataggcgctatgctgcgggaacagaaggtaagctcattgcaggtctggtgtatttgccgcaccttgtagtcacggcgtcaatgggcgtattataaccgacaagagcagtcaactattgagctaatgccatgatcaaaataacagatgcagcacaatctcattttgccaaattgctggcaaatcaagaagaaggtacccaaatccgcgtatttgtgatcaacccaggtactccaacggcggaatgtggtgtgtcctattgcccgccggatgcggttgaggccacagataccgagctaaaattcgagcaattatccgcctatgtggatgaattgagcgtaccttatctgcaggatgctgaaatcgacttcgttaccgatcagttaggctcgcagttaaccctgaaagcgcctaatgccaaaatgcggaaagtggatgattctgcaccgctgatggaacgggtagagtacgttttgcagtcgcagattaacccacagctggctggccacggtggtcgcgttacgctgatggaaatcaccgatgacgggctggcaattcttcagttcggtggcggttgtaacggatgttcgatggtcgatgtgaccctgaaagaaggcatcgaaaaagagctgttacagaaattccctgaattgaaaggggtaagagacctgaccgagcatcagcgcggcgagcattcttattactgattccgttgtcttaaactggcaatggcaactctcactgccgttgcctaattgagaaacgctggaaaataaagggggtcgactcatcatcggctcccctttttaatttctacccttcaacgaatggcatcggataaacgctgatggttaacccgcagagacattcttgcgccgcttatccaaatccttcaaaagacggttaacccgctgatcggcaaacatctcctctaaagaatgggtcagcttacgacgccagttcggatactcatcgctggtgccgggaatattgaccggcgctgccatatctaaccagtcttccggctgtaatcccaacaacgcgctggcgctatctgccacatagcgttgtagacctctatttaacgttggactcatcgctagcagcgccgccttgcggccgactttcttcggtacgcagccataatggtgcaaaccttccagcaggccttgcttggctctttcccgatccgcatacaactgtttgagaatctgctggtctgggtacaaacccagcttattgcccaaagtcagatcgtcactttgccagtagccacgcagcgtcggtaaatcatgagtagtaatagtcgccatcgcctgcaccggataagactgaggcgcacggaaagtgttttcgctatctctttcaaagtagagcactttgtaagaataaacaccgctatcccgcagcttgctgactatttccaccggcaccgtccccaaatcctctccgatcaccatgcagcgatgacgctggctttccagcgccagtactgccaaaagatcgtcaaccggatacttcacataagcgccctgatctgccgtttcaccataaggaatccaccacaggcgcagcagtgccataacatggtcaatccgcaatgcgccacagctggtcatattggcacgcagcaaatcaataaatggctgataggctctggctaccatcacgtgaggatccatcggcggcaacccccagttttgacctaaagggccaagaatatctggcggcgcgccaaccgaggctttcaggcaatagagttcgcgatcgcaccaggtttccgcgccgccttcggctacgccaaccgccaaatcccgatacaaacctatcggcattttttgctgctggctgtggcggaaacactgggaaaactggctggctgccaaccactgcaaccacaggtagaaagtcacctcatcactatgctgctggcaaaactccgccacaccttcgccctgtccatcgcggtattgttctggccacaccggccagccccacatagcagaatcctgttggcttaaatgagcatgtaaagcatcgaaagcggcctgttgctgcaaacttttaccgccctgctccacaaactgccggaagtcctgcatttgcttatcattggctgctcgcgccaaaaacagcgggaaagccagacgtaaaccggccagtttcagctctgtcactttggcgtaatcgacccattcggcggtgcggatcgcagccagcgtgctttgggtttgcggcagatgccaccagcgctgagctgcttcactctgctgaaattcctccacgttgttcacgtcgatataaaccacattcagccagcgacgggacgaagggctatatgggctggcgctattgggattggccggatacaacgcatgaatcggatttaagccgataaatgcaccgccacgccctccgacctgttcaaccattcggtctaaatcgccgaaatcaccgataccccaattacgctccgaacgtaaagtgtagagctgtacgcaggcgccccagagcttttttccggtcagcaacgcgtctggctcatagcaacgtttcggtgccacaatgattgaacattgccattgctgcgtaccttgctccaacgctagatgatggtaaccaaggggtaacgatgccggcaacgtcagggttttttgggcgctaacgcgcccttgatgtgaaataccctcttctgtcaccagttgccagtgataatcaccttcaccgccgatagccagagtcatcgggcttacgtgagtaaagactttcaccaccggtaacggcgttttctcacccagcgaaggctgaacggaatccgggcttcgtcccatggctaccagcagtttctgcttggtttccatcggtatagcctgctgtttaccgtgggcattaatgtagctggcggctatccctgccagcgtagctgcctgatcgagcgatttacgatccatgcagtctccttaacgtttggcttgccagattcgctgctgataatcgcgaatcgaacgatcggaactaaacattcctacccgcgcggtattaagaatggtgcgacgagtccattcctctttatcacgatacagtgcatcaatctgctgttgagcctcacaatatgaagcaaaatcagccagtaccagatatggatcgcccccttcacgcaggctatgcagcatcatatcgaaagcgtgtttatcaccgttgctgaaggcaccgctggccagttcgtccaaaatactcttcagatgcgcatcggctttcaagactttcagtggctggtagcctttcgccaaaatagctttaacctgctcgacggtgttaccaaagataaagatattctcatcaccgacctgctcggcaatttcaacgttagcgccgtccagcgtgcccacagttaaagcgccgttcaatgccaacttcatgttaccggtgcccgatgcctctttaccggcagtggaaatctgttcagaaacatctgccgccggaatcatcagctcggctacggagactttataatcaggaataaatacaactttcagacgatctttgacgatcggatcgttattgatcttctcggccgcctgattaatggcgtaaatgatatttttcgccaggtaatagcccggtgccgcttttgcaccaaacaggaagacccgcggggcaatatccagattaggattatcgcgaatctggcgatacagcgacagaatatgcagtaaattcaaatgctgccgcttgtactcgtgcaggcgcttaatctgcacgtcaaagatggcatctggattcagcgtaattcccatagtgcgatggacgtattcggcaagttttaccttgttgtcgtacttaatctgctgatagcgcgcacggaattttttatcctcggcgtagggctccagcccttccagcacatccagattgttcgcccattccacttttaaagtttcgtcgatcaacgaagaaagggccggattacactgttttagccagcggcgcggcgtaataccgttggttacgttatggaatttttctggccacagctggaagtattccgggaacaaatctttaaccaccaaatccgaatgtagttgcgccacgccgttcaccgcgaaaccgctgaccacacacaggtttgccatacgtacctgtttatcatgatgtacggccagttttgcccacaccgctttatccccaggccactgtttatccacccgttttttaaactgagcgttgatttgcttgatgatggcaaagtggcgcggcaacaggctacgcaccaatttttcatcccaacattcaagggcttccggcatcagtgtatggttggtataagcgaaggttttactggtaatagcccaggcagcatcccagctcaactgatgttcatccaacagcactcgcagcatttcaggaatagcgatggttgggtgggtatcattcagctgaatcacttcatattcaggcagatcggccagtgtacgtccggcggcgtgatgtttgcgtaaaatatctgccacggaacaggcgcactggaagtattgctgcatcagacgcagacgctttccggccagatgattatcgttgggatacagaaccttagtcagtttttccgcatcaataccgttttgttcggctagcaggaatttaccgtcgttaaacttagtcagatcaaacggatgaacgtgggttgcctgccataaacgcaggggctgagtcaccccattgcggaagcccaataccggtaaatcccaggcttcaccgcgcagcgtaaaatctggacgccaaagctgacgaccatcggcctgtttttccagcttgccaccgaaactcacgtccaccgccagcgccgcattatgacggaaccacgggtagctctcgcgctcccagttgtctggcgcttcctgctgctttccttcgctaaatgactgacggaacagcccatattgatagttcagcccatagcccgtcgccggttgctccaccgttgccatcgaatcgaggaaacaggccgccaaacgtcccagaccaccgttacccaaagccggatcggtttcctgctccagcaagtcggccagattgacctgctgctctgccagcagtttctcaacggtttcataccagccgaggttgataagattatttgccgtcaagcgaccaatcaggaattccattgagatgtaattcacatggcgctgcgttttttgcactttagtcggcgccggttgagccgccaactgttcggccaatgccgcgctgaccgcctgccaccattggtgctgggtcatctgctgggccgaactgaggccaaagcgctgccactgacgggtcagtgctgccagaaaatcatccttctttagcatgggctgtgacatagggaagtctctatcctgtgagtggggtaattttacccttatcctgccgaggagaatcggcaagagcatcatcctggtaagggattagctggggatgagtcgcagggcgtagctaaaaatgtgatcaggtgcaacttacgaccataggaagtattaacgttattgcaataatttggccgttatcagaccttaacagggctgattaattacgaggcttaaaataattatccctatgaatccgccggtctgtcgttgccatttgagtctggaataatatgctgatcccttcaaaactgagccgcccggtacggctgcaaaataccgttgtgcgcgatcgcctattggccaaactttctgcggcagcgaactatcgcctgacgctggtgaattgcccggcggggtacggtaaaaccacgctggttgcccaatgggcagcggggcaatccaacctcggctggtattcactggatgaaagcgacaatcaacctgaacgtttcgctacctatctggtcgcggcggtgcaacaggccaccggtggacattgcagcaagagcgaagcgctcagccaaaaacatcaatatgccaatctttcggcgctgttcgcccaattatttgtggaactgtccgactgggacgggccgctgtatctggtgattgatgactatcatctgatcaccaacgacgccattcatgaagccatgcgctttttcctgcgccatcagcctgaaaacctcacgctgctgattttgtcccgcacgctgccgcctttgggcatcgccaatctgcgggtgcgcgatcagttactggaattgggtattcaacagttggcgtttaatcatcaggaagcgcagcaattctttgattgccgcttgccagtaccattagatcaaggagatagcagccgcctgtgtgacgaagtggaaggttgggctacggctttgcagcttatcgccctttcctctcgtcaacccaattcatcggcgcaaaaatccgctaaacgtctggctgggttaaatgccagccatctatccgattatctggtagatgaagtattggatcaggttgatgctaatgctcgtgcatttttgctacgttgttcggtgctgcgttcaatgaacgatgcgctgattgtgcgtctgaccggcgaagacaacggccagcaacggctggaagaattggaacgacaggggctattcattcaccgaatggatgacactggcgaatggttctgtttccatccgctgtttgccactttcctgcgtcaacgctgccagtgggaactggcgttggagctaccggatcttcaccacgccgcggctgaaggttggatggcgctgggttatcccgctgaagctattcaccatgcgctagcggctggcgatgtggggatgctgcgggatattctgctgcaacacgcctggtcacttttcaatcacagcgaattggcgctgctagaacaatgccttagcgcactaccttattctttgctgatacaaaatcctgaactggcgctgctacaagcctggctggcgcaaagtcagcatcgctatagtgaagttaacactctgctcggtcaggccgaaacggcgatgctggaacgtaaaattccgattgatgctgcgctcagcgccgaatttgacgcactgcgagcgcaggtagccattaacgcaggcaagccagatgaagcggaaaaactggcaaccgatgcgctgaaatacctgccgatggccagttactacagccgaattgtggcaacctccgtcacaggtgaagtgcatcactgcaaaggtgaactggctcgcgcgctgccaatgatgcagcaaactgagcaaatggcgcgccgccaccaggcctatcactacgcgttgtgggctctactgcaacagagtgaaattctgattgcccaaggcttcttgcaggcagcgtttgaaactcaggaaaaagccttcgagctgatacgcgaacagcaccttgagcaattgccgatgcatgaattcttactgcgtattcgcgcgcaggtgctgtggtcgtggtcgcgactggatgaagcagaggaagccgcacgtcagggcatcgctattctcgccaactatcagccacagcagcagttgcaatgtctggcaatgctctccaaatgctcgctggcgcggggcgatttagataacgcccatatgtatattcaacgctgcgaagccttgatccacggcactcaataccatcgcgactgggtaaccaatgcggataagcccagagtgatttactggcaaatgaccggtgataaaacggctgcggctaactggctgcgtcaggcggaaaaaccgggcatggccgataaccatttcctgcaaggccagtggcgtaatattgccagagtgcagattatgctcggttatttcgatgaggccgaagtggtactcgatgaactcaacgaaaatgcccgtcgcctgcgcctgaccagcgacctcaaccgcaacctgctgttaagtaatattctttactggcaaaccgaacggaaaggcgaagcgcaaaaagcgctgatagaatctctgacattggcaaaccgcaccggttttatcagccactttgtgatcgaaggggaagcaatggcacagcagttacgtcagcttatccaactgaacgcgctgccggaactggaacaacatcgtgctcaacgcatcctgaaagacatcaaccagcatcatcgccataaatttgctcattttgacgaacgctttgtcgataagttactgacccatccgcaggtgccagaattgattcgtaccagcccgctgactcagcgggaatggcaggttctcgggttgatttactccggttacagtaatgagcaaatagccagtgaactggacgtcgccgccaccacaatcaaaacccatattcgtaatttgtatcaaaaattgggcgtggcgcaccgtcaggaagcggtgcaacaagcgcagcgattgctgcaaatgatgggatacggcgtttaaccgaccgctgattttatctggcggacatttatccataccaaccaatgggtctttattggcataaaattgattacaatagcggcataaccacattaatcgccaataaaagggtgtcagcagtatggaacaatttgaagcaatcgacgttgagcaagcctacactcgctggaaagagggtcaggcggttctggtggatattcgcgatccgcagagctacgaagccggccatgcgccgggcgcatttcatttgaccaacggcagtttgcagacttttatgcaacaaaccgattttgaccagccggtgatggtgatgtgctatcacggcaacagcagccgcggtgcctctcaatacctgctggagcaaggtttcgatgctgtttacagcattaacggcggtttcgaagcctgggccagaaattacccgcaagatgtcgctacagacaaagcctgatttaccccttttcccaatgcaagaggccgccgctggcctctgccttgcgccatattgcatcacccacaagaatgatattaagccgacatattcacctgtctcggcggttttcgttgttgtgaactctggctttttttaaacaacagatgacatccctacagcgaaaagggagaatcagtttgctaacatgctaaattgctacgataaagctttagatattttataaatcataacgttagacggtaaattataaatatgattcgtgtgatagtaatttctaacctacgtctggcgcaggcctttgtggactatatggccacgcaaaaggtgattttggaactccgacaccagagccaggatgcagaaatctggctaaatgaggatgaaaaactgcctcaggttcagcatgagctggaacaatttttattagacccactcaacccgcgctatcaggcggcgagctggcaatcgggcaatcttcacaccgatatgccttatcagcgtgtttcgctgttgcagaatttacgtagtcaggctggcccactcaccctcggtctgatggcggtatgtattgcagtctatattctgatgcaaatcgttggcgataatgcggttatgagctggctggcctggccggtaaacagcagccagtatctggaaatctggcgttgggtcagccacgctgttctacacttctcgctgatgcatatcctgtttaacctactgtggtggtggtatttgggcggccaaatggaaaaacgcctcggcacgggaaaactagtggtattaacccttgtttctgccgtatttagcggctggggacaatccttattcagcggctcaaattttggtggcttgtccggcgtggtctacgccctgatgggttacgtttggctgaccggccaacgggcgccggagcggggagtctctctccctaacgggttgatggctttttctgttctgtggttaatcgccggatatttcgatattttaggtctgtcgatcgccaatgccgctcacgtttctggtctggtcattggattactgatggcattttgggatacgcgtaatagcacccgaaccacacaataacggtccgtaaaccgggcaaattaggggattatcgtgaagcaaacgcagcgacatgatgcgattattgaactggtgcgccttcagggttatgtcagcactgaagaactggtagaacactttgctgttagtccgcaaaccattcggcgtgacctgaatgatttggccgatcaaaataaaattcatcgccatcacggcggcgcagcgctgccttccagttcggtcaacgcggcctataacgaccgaaaagtcatgtggtctgaggaaaaagcgcgtattgctcaacgagttgccagccagattcccgatggcgcaacgctgtttatcgatatcggcaccacgccagaagccgtggctcacgcgctgctcaatcataaaaatcttcgcgtcgtgaccaataatctaaacgttgcgaccttactcaccgctaaagaagatttccgcctgattctggccggtggcgaagtgcgaacccgtgacggcggcattattggcgaggccacgctggatttcatctcccagttccgtctggattacggcattttaggcatcagcggtatcgatatggacggctctttgcttgagttcgattatcacgaagtacgcaccaaacgcgcgattatcgaaaactcccgctgcgtgatgttggtcaccgaccactccaaatttggccgtaatgcgatggtaaatctgggaaatatgaatttaatcgactacctgtttaccgatcagcagccccctgccagcgtgatgaaaatcattgagcagcatgatgtgcagctagaactgtgttaattcccgccctctggctcacccaataagacttgaactacaatcaggggcttcggcccctattgacgatatttacccacactttcgccgctattccctgccatttctctcaagttagacacccaagacttcacctataatctatctataagacggtaaaaacgcttcccgcaaaggaagtttgcttcgctgcactgattacatctttaaaatgaacccgcaacaaaactgttaccttcatcacgcataaatgtttttctttggttaactcttggcttgtttgttggtttttgattacaatcgtgagcgaaaacgaacattaaagagctgtttcgaacatctggaggaaggttacatggaaaccaaagacttgatcgtgatcggtggcggcattaacggtgccggtatcgctgcggatgctgccggacgtggcctgtcagtactgctgctggaagcgcaagacttggcctgtgctacgtcttccgccagttccaaacttatccacggtggcctgcgctacctggaacactacgaattccgtctggttagcgaagctttggccgagcgcgaagtgctgctaaaaatggcaccgcatatcgccttcccaatgcgttttcgcctgccacatcagccccatctgcgccctgcctggatgattcgcgccggtctgttcctgtacgatcacttgggtaaacgtaccactttgcctgccagtaaaggcctgcgttttggcgcagattccgtcctaaaaccggagctggtgcgcggtttcgaatattccgactgttgggtggatgatgcgcgtctagtggtgcttaacgctcaggaagtggttgaacgcggtggcgaagtgcgtactcgcactaaagtgacccgcgcctggcgtgaaaacggcctgtggatggtagaagcaaccgacgtcaatactggtaaaaccttcacctggcgtgccaaaggtctggttaacgccacaggtccttgggtaaaacagttctttgacgatggtctaaaactgaaatctccttacggtatccgcctgattaaaggcagccatatcgttgttccacgcgtacataaccagccgcaggcttacattctgcaaaatgaagatcaccgtatcgttttcgtcattccgtggctggatgattactccattattggtaccaccgacgtggaataccacggcgatcctaaagatgtgaagatcgacgatcaggaaatcgattatttactgaaagtgtataacgaccactttaagaaacagcttggccgtgacgatattgtctggacatactctggcgtgcgtccgctatgtgacgatgaatccgactcaccgcaggccgtgacccgcgattacacgctggacgtggctgatgaacagggcaaagccccgttgctatcggtattcggcggcaaactgaccacttatcgtaaattggcagaacatgcactggaaaaactgactcaatactacccgaaagtcggcccagcctggactaagaacggttcgctgccgggtggcgatatcggcggcgatcgcgacagttataccgttaaactgcgccatcactataactggctgccggaagctctggcgcgccgttatacccgcacttacggtagccatagcgagattattctggccaatgccaccagccttaaagatttgggcgaagatttcggccatggcctgtacgaagccgagttgcgctatttggttgagaaagagtgggttgtcgagttagacgatgccatctggcgccgtaccaaactgggtatgtggctggatgaggcgcagaaacaacgcattgccgaatggttggcggcagttcatgccgagaaaatgaatacgctgtcactggtttcctgattcgacagacgcgccgcaatgaaaaaaaccgcctgcttcctgatagaagcggcggttttttcttagagttttatcggtttaatgtgccaaatctcatcggcatattcctgaatcgtcctgtcagatgagaaataccccatattggcgatatttaataccgcacgacgagtccattcatccggttgtagatatagctcatccaccgcgtcctgcgtatccacatagctacgatagtcagccaataactgataataatcgcccagattaaccaacgaatcgaacaggctggtatagcgattgggttcttctgggctgaaaattccggtggcgatctgcgtcaacacttgatgaagctcagggtcttcatcatagtatttccgcgggttataaccactgcggcgtaattcttcaacctgctcagcggtgttaccaaatatgaaaatattatcctcaccgacgtgctctcggatttccacgttagcgccatcgagggtgccaatcgtcagcgcaccgttcagggcaaatttcatattactggtgccagaggcttcggttccggctagtgaaatctgctcggatagatccgccgccgggataatcatctgcgccagactaacgccatagttcggaataaacacgactttcaacaggttgttcaccctaggatcgttgtttattactttagcgacatcattgatcaagcgaataatctgtttcgcattgtaataggccgatgccgctttaccggcgaagatcaccactcttggtacccatttcgcctctggatcctgcaaaatacggttatagcgcgtgatcacatgtaaaacattcagcaactgccgtttgtattcatgcattcgctttatctgcacatcaaacagtgccgcgggattgagcacaatattcaggttttgtgcgacataaattgccagccgctttttattttccagcttggctttctgtatcgcctgtaaaaagctcggataatcaatattgggtttgatatcgctcagttggctaagatcggtacgccagttatggccaatgctgtcatccagcaccgccgccagcgggcgattcgccagcccaagccagcgacgcggcgtcactccgttggttttattgcagaagcgagtcgggaaaatacgagcaaaatcagcaaatagagactgaaccatcaactcagaatgcaacgccgatacgccgttcactttatggcaggcaatcacggccagccacgccatgcgcacccgccgcccgttcccttcatcgataatcgacactctggacggtaattcattatcgtccgggaaggcttcctgcacttgtttgaggaagtgatcgttaatatcgaaaataatttgtagatggcgcggcaaaatcttaccaatcatatcgatcggccaggtttccagtgcctcagccatcaaagtatggttggtgtaagagaaaatggtttccaccattccccaagctttgatccaggtaaatttatgctcatcaatcagcaaacgcattaattcagggatagacaacaccgggtgcgtatcattcagatgaatggcaatcttctctgccagattgtcgaaggtatgatgcagcgcccagtggcgggctaaaatatcctgaaccgtggctgaaaccaggaaatactcctgccgtagacgaagttctcgtccggaataggtcgaatcatcgggatacagcactcgcgatacgttttccgaatggttcttatcctctaccgccgcaaagtaatccccctgattgaatttacccaaattgatttcattactggcgcgcgccgaccataaacgcaatgtattagtcgcatcggtatcaaaaccaggaatgatttgatcataggcgcaggccagaatttcctcagtttccagccagcgggtttttgtcccttcctgctggatacgaccaccaaagcgcactttataacgtgtgttatgacgcgggaattcccaggcattaccgtattccagccagttatctggggattccgcctgctgcccattgacgattttctggctaaacatgccgtattcgtagcgaatgccgtagccccgccccggcatggctaaagtcgccagtgaatccagaaaacacgctgccagacgccctaaaccgccgttccctagccctgggtcactctcttcggccagcaactcattgaaatcgatacccatttcatccagcgcggctttgatatcatcataaatacccatagataacagcgcgttggacaatgttcgacctaacagaaactccatcgacaggtaataaacctgccggacatcttgagataattgtgcccgattggagcgcagccagcgttccaccatacggtcacgcactgcgaacagcgtggcgttcagccaatcgtgctcagtggcgatggaaggatctttaccgacaataaacatcagcttataggcaatagagtgtttcagtgcttccacactgactacgggtgaggtgtagctaaagggtgtcgtcattagcggtatttccctaatttgtggttacaacaagtgttgataaagcgaccggtagtctgctgccgctacctgccaaccaaaatcaagctccatcccatgacgctgtacgtgacgccaatgttttggacgaacccagagcacaaaggcacggcgaattgcccgctccagttccgctgcttcacattcatcaaacacaaaccccgatgcgctaccatcggccagattttctaaagcacaatccactactgtatccgccagcccgccggtatggcgcactaacggcagagttccgtatttcaaaccgtataactgcgtcaagccgcaaggctcaaaacggctgggaaccaagatcacatcggcaccggcaataatccggtgcgagaacgcctcatgataaccaatctgaacgccaacctgatctggataatccgccgatgcggccagaaaagcctcttgtagcagcgcatcccccgcgcctagcaccactaactggccacccagcctgagtaactcgggtaacgcctgtagcaccagatccaaacctttttgcgccgttaagcggctaaccaccgcgaaaatcggttttttatcagtaacctgtagccccatggctttctgcaaatgggctttgttgaccgccttgcctcgcaaatcttcagaatcatagcgctctcccaacagagcatctgtggtcggatcccaaatttcttcatccacaccgttgagaatgccgctcaatcgcccttcccgcgctcgctgttgcagcaatccctccattccgtaaccaaaggcaggctgggtaatctctttagcgtaggtcgggctaacggttgtcacatgatcggcgtaaaacaaaccggctttaaggaatgaaatctgaccgtagaattccaaaccgtagatattaaagaaggacggcggaagctgtagctcagccatatggtgagcggaaaatagcccttggtaggccagattatgtaccgtaaagaccgaacgagccggacgtccccgcgccgccagataggcgcaggccaaacccgcgtgccaatcgtgagcatgcacaatattggggcgccagtagctatccagcccgcaggccagttcgcaagccatccaaccaagtagcgcgaagcgccgatgattatcaccgtaagcattcaaccattggtcgtggtaagggctgccggggcgatcgtataaacctggcacatcaatcaggtagattccaacgccattgtaagtgccataactcaattccacccgcccggcgaaggtatcaatttctttgactaatactctatggggaatgccgtttttcaggtcgggaaacgccggtaaaatcacccgaacgtcggtgccatcggcaatttgagccgcaggtaaagcgccgacaacgtccgctaatcctccggtctttagtaagggaaacatctcagaacagacatgtaaaacccgcatcattactcctggtatctcatcagctaccaataggcttacagacaacatacggcttcggccagaatatcaggctcacgttttcacgccagcctgaagctaaattacaactgagccagcatttcccttgtgacgagtacaattccgccttccgaacggtagaaacgtgcactatcctcttccgcattctcaccgatcaccatcccttctggaatttggcaggcgcggtcgataatgcagtgccgtaaacgacacgatcggcccacattaacgtctggcagcagcaccgctgaatctatcgtacagaacgagttaatccgcacccgagggaatagcactgaatgcaccaccacggaaccggaaacaatacagccgccagaaaccagtgaattcatggtcataccgtggctaccggagcgatcctgcacaaattttgccggcggcagtggttccatatgcgtgcgaatcggccaggagcggtcgtacatatccagttccggcgttaccgaggctaaatccaggttagcgcgccaataggcatccagtgtcccgacatcacgccaataaggcggtaagtcgccgttggaagtcacgcaagacagagtaaacggatgcgcccaggcttctccccgctcggtaattttaggtatcaggtctttaccaaaatcatggctggaccccagagtattcatatcctcgagcaataatttatacagataatccgcattaaaaatatagatccccatgctggccagcgccatatcgggatttccaggcattgatgccggaacttccggcttttctgtaaacgacttgatctgatagtccagagacacttccataacaccgaatcccgaagcttcgcttagcggcaccggaatacaagccacgctacatttcgcccctttttcaacgtggtcaatcagcatgcgcgagtaatccattttataaatgtgatcacccgccagaatgacgatatattccgcattgtatctgtgaataatatccagattctgatacaccgcatccgcggttcccttgtaccattcttcagtgctcaaacgttgctgagccggcagcaaatcgacaaactcgttcatttcttcgttgaagaacgaccaaccgcgctggatatgctgaaccaaagaatgggactgatattgggtaatgacgccgatccggcgaatgcccgagtttagacagttagacagggcaaaatcgataatgcgaaacttaccgccaaaatgtaccgccggtttggcacgagtggccgtcaggtctttcaagcgcgaaccgcgccctcccgctaaaatcagagctaccgatttaagcggcagtagtctggctaacatcaacggatctctattttcgaatttaaccatagcggattccttagattttttgttcaaacacacgcactgaaaatgcggcgctatgccccgtaagtaattctgtctgttgcggctcagcgacatcgcgcgaagcaaaaggaggtacaggcagccatttcccggcgggtaaagtcaattcacaggcttggtcggaggcattaatcaccactagccaacgttgagataaacaaatctggagctttctttgaaagccctgctcccaggctaaggcactcatttcctgcccctgcatgttcaaccattgcacactgccatcgccttcctgccaccagcggtcttgcgtaagcgccggtattttttgccgcaggcggataagttcggcagtaaagttcgccagatcgctatctgcctgtgtccaatccaaccaggtcatagcgttgttctgacagtaggcgttattgttaccttgctgactgtggccatgctcatcaccggccagcagcattggcgtacctagtgaaagcagtaacgtgctgagtaacgcccgctggcaggccttgcgcctatgccagaccgcctcatccgccgttaatccttcattcccgaagttattgctgaaattactatccgtaccgtcgcggttgtcttcaccattagccagattatgtttttggttgaaacacaggagatccagtaaggtaaaaccatcgtgtgaagtgatcatgttgatactggcggaaggcaaacgctcccgctgagcatagatatcggcagagccggaaaaacgttgggcaaattgccccaaagagaattgattgtgtagccagaaacgtcgcattccatcgcgatattggtcattccactcgctaaaaccgcgagggaaatggcctacctgataaccgccccagccgatatcccaaggttctgcgatcattttgcaatgagccaaccgcggctccgcttgtaacgcttggaaaaagggtgcgtcctgatgaaattcaggcgtgcgccccaaaatcgcgccgagatcgaagcgaaaaccgtcgacgtggcaactctcaacccaataacacaggcagtcgattacccaacgaaccacttccggatgatccagcttgagcgcgttaccgcagccggtttgattctcatactctccctgcgcgttcagccagtaatagctggcattatcgatccctcgcagcgatagcgttggcccttcagcgtccagctcggcgctgtggttaaacaccacgtccagaatgacctcaatgcctgcacgatgcagggcttttaccgcatcccgcagttcccgcagcggtgagaaaccttcccgcccggatgcataatccggctctaccgcatagggcgctaatacgttgtagccccaatagttggttagccccagtttctgcactcgaggttcatccacatgatgctgaatcggcagcaattccagcgcggtaataccgagctttttcaggtaatcaatcatcacaggatgagccaaagcaccatagctgccacgtagcgtctcgggaatgtcggggtgtagctgagttaatccgcgaacgtgagcttcataaattatcgtattgccccaaggcaccgccggcgggcaatcgccctgccagtcatattcctcatgtaccaccacggattttggcatcgcatcggcgctatcctgctgatcggcatgatccattccgccgaacaggcgcggatcgtcatcaacgcgtccttccactgcacgagcacagggatcgagtaggagtttctgcgcattaaaacgatgtcccgattggggatcaaacggcccgctaacgcgaaatccgtaacgctgaccaggctgaccgccgggtaaatatccatgccagatatcgccgctgcgagcgggcaacggcaagcgaacctcccgccccgcttcgtcgaacaggcacagttctacgtcataggcatgagccgaaaacagggtgaaattaatccctgaaccgtcaaaatacgcgccaagaggagtaggagaaccagtctgtaacgtggtcatgctatccctccctcagcagataaagagtggcgagcggcggtagagtcagcgataaagattgatcctggttatggctgccaatctgttgagtatcaatcgcgccctgattacccaaattactgccacaataataggttgaatcggtattcaacacttcgcgataccgtccggcgcggggcacgcctactcgatagttatagcgcggcaccggggtgaagttactgatggcgatcaattcattacctgccgcatcacggcgcaggaaagcaaaaactgagttttcatggtcatctaccaccagccattcaaaaccttccggctgataatccagttcgtacagcggcgcattatcttgataacaatggttaagatctcgcaccaaacgttgaacgccgctatgccagccgttttcgtcatcgagcaagtgccagtccagactggtgtcaaaattccactcccgcccttgagcaaattcgcatcccataaacagcagttttttgccgggatgcgcccacataaagccgtaataagcgcggaggttagcgaatttctgccaggcatcgccgggcatccgatccagaatcgagcgtttgccatgtaccacttcatcatgggaaagcggcaacacgaaattctcggtataggcatacaacatgccaaaagtcattagattatggtggtatttgcggtgaaccggatcgagctgcatgtaattgagcgtgtcgtgcatccagcccagattccatttgtaattgaaacctaaaccattggcttctggcggcaaggttacgccgggatagtcggtggattcttccgctaacgtcaccgcgccgggtcgttctacgccgagggtatggttggtgtaacgcaggaaagaaatagcttccagattgtctctgccgccatattggttaggcacccactcgccttcggcccggctgtaatcccgataaatcatcgaagcgaccgcatctattcgcagaccatcgataccaaaacgttccagccagtaaaaagcgtttcctgccagatagttgcgaacttcatttcgtccgtagttataaatcagggtattccaatcctgatgataaccttcacgcggatcggcatattcgtacagcgcggtaccgtcaaactgcgccagaccgtattcatcactagggaaatgacctggaacccaatccagaatcacgtttagccccgcctgatgggctttctcaatgaattgcctgaaatcctgtggcgttccaaagcggcgggtcggtgcatacatgcccaacggttggtagccccaactgccatcaaacggatgctcactcatcgggagtaattcgatatgggtaaaacccatatatttgacgtaatcaaccagttgttcagctagttcgccgtagctcagccagaaattgttttcggtatgtcgccgccaggaccccagatgaacttcataaatagaaactggcgcattgagcgcattggctttttgtcgaatgggagagttctcaacaatatcaggcagtgggctaatcagagaggccgtttctggtcgcatttgcgcttcaaaagcgtaagggtctgcttttaggcgaatatttccattactgtctattatctcgtatttatatagctgtccggcctgtacacccggtaaaaaaacttcccaaataccgttttcttttctcagcctcattggttggcggcggccatcccagaagttaaatgcaccaacaaccgacactcgcttggcattaggtgcccaaaccgcaaaactgacgccttccaccccgtctaaagacatcaaatgagcacctaaacgttcataggggcgcaaatgcgtaccttccgccaataaccagctatctatatcctgcaataaggggccaaatcgataaggatcttcgataatttcagtactatccgcccaaataacagctaactggtagcgaaatggatttttacgacgaggaatgacagcggcaaagaagcccctggaatcgatacaatcgagccgagtgactttcttattggttttgcagtcaactacccatacttctttagcatcaggcagcagagcacgcacttgcagcatatcggcaactttgtgcataccaagaatggaaaaaggatctgaataattaccacaaataacctgattaatcacattttgctcgggaagtgctgacattttatctttcctatgactaatagcatgatttacaagaaaaaatcattaagataaataaaaattcaacttatctatcatgcaatccatttaccgtataaatcatgacgacgatcaaaatgacgatttttttagcttaaaatctcaaaaaaccaccctgataaatttcaatcccggctcagagttacccttgtgacaatgcgcgccccaagctataagcatagtcaaaggtgagtaaaaaatggttaagcaatcaaggaaatccctttccagcactaaaaggaataatccggttaatttatttcgggttagcggcagttattcactcaaattggcactttggtagcagatctcacggtctgtgtttttttatatttagttgttcgagttaaaattttctcattcatgccttcgttataatggcctcggaaataacggaggcaatacagcatgggcgttagccagaccgaactgattttttcattactgcaacaaatgtgcgtatatctggttatcgcatacctgctcagtaaaacaccgcttttcattccattgatgcaagtcaccatccgcttgccgcacaagctggtgtgctatctcaccttttccatgttttgcatcatggggacttatttcggcctgcatattgatgattccattgccaatacacgtgctattggtgcggttttaggcggcgtactggggggaccatccgtcggttttctggtcggcttaaccggcggattacaccgttattctctgggaggaatgaccgcgaccgcctgtatgctctccacggtcgcggaaggtctgataggcggcttccttcataactacctgattcgtaggaatcggctggatttactgttccaacctttagtgattgctggcatgacgttagtggcggaagtgctgcaaatgctgattattctggcggtttcgcgccccttttccgaagcggtggaactggttgaaaatattgcattgccgatgatgatcaccaataccattggcgcagctatgttcatgcgcatcctactggatcggcgcgctattttcgaaaaatacaccacggcattttcggctaaagccttacagatcgccgccagagcagaaggactattgcgacacggatttgatcagcaaaacagtatgcgagtagcgcggattctgtatgaggaattgggcgttggggcggtggcgattaccgatagagaaaagcttctggcctttatcggcaccggctcagatcatcatattgtcggttccgcgattacttcacaccacactcatcgagccatcggaatggatcaggtggtttatgccgacggcaacgcggtgccctatacctgttcgatttcacccacttgcaaactaggctctacgctggttattcctctacgaggagaagaacatcgcgtcatcggcagcattaaactgtatgaaccgaaaaccaagctgttttccagtatcaaccgcacgctaggggaaggcattgctcaccttctatcggcgcagattatggcgggtagatttgagcaacaaaaacaattattagcccagtcggagatcaaactcctccacgctcaggtaaatccgcattttctattcaacgccctcaataccttatcggttgtgattcgtcgcgatcccaatcacgctcgcaaactggtgctttcactttccaccttcttccgtaaaaacctgaagcgcagccacgatgtcgttactctgagcgatgaaattgagcatgtgaatgcttacctggaaattgaaaaagcgcgctttgccgatcgattgaacgtcaatatcgccctgccagaaaatattctggctgcccgactacccgcgttctctttgcagccggtggtagaaaatgccattaaacacggaatttctcagatgttcagcaatggaaatattaccctacgcggcaatatgcaggatggaatcctgacgttggaagtagaagataatgcgggattgtatgaatccaagcccgacggggacggattgggcatgaatctggtcgacagacgtatcaaggtgcgttatggccagcagtacggcgtgaccgtgacctgtgagacggacatatatacccgtatctcgattaaattaccgttccataccgcagcagaaaattgaattaatccgctgatatttagcgataaaaaaaggttgctagcatcgcaacctttttgattttttagcgacttcagaactacagttttagagcggcagcgattacgccagaatccgcagcatacggcgtaacggttctgccgcgccccaaagcaattggtcgccaacggtgaaggcggataaatactccggccccatgttcagcttgcgcaaacggcctaccggcgtattcaacgtgccggtcacggcggcgggagtcagctcacgcatcgtcaactcgcgatcgttcgggatgactcgtacccaatcattgtgggttgccagcaacgcctcgatttcaatgagcggaaggtcttttttcagtttcagagtaaatgcctgactatgacagcgcagagcgccaacacgcacacataacccatccaccggaataacgctgctggtattcagaattttgttcgtttccgcctggcctttccactcttcccggctctggccgttatccaacgctttatcaatccacggaatcaggctgccagccaatggcacaccaaagttatcggttggcaacgtgccgctgcgtgtcgccgccgtcactttacgctcaatatccaaaatggcagaagcagggttctgtagctctttggctacgccagcgtgcagcatacccatttgggttagcaactcacgcatatgacgagcaccgccgccggatgcagcctgataagtggcaacagacgcccattcgaccaggtcattggcaaacaggccacccagtgacatcaacatcaggctaacggtgcagttaccgccaacaaacgttttgattccctgatttaacccttgctgaatcacatcattgtttaccggatccaaaataataatggcatcgtctttcatgcgcagagaagaagctgcatcgatccaaaaaccctgccagccgctggcacgcagctgaggataaattccgttggtataatccccgccctgacaactaatgataatatccagagcacgcagcgcgtcgatatcataagcgtcttgcaaggtgccctgctgaccggtaaaagtaggcgcagcctgaccgtgctgtgaagtagagaaaaagaccgggcggatgccgtcaaaatcgcgttcttcgatcatgcgctgcatgagcacagagccgaccataccgcgccagccgataaaaccaacgtttttcatgtttactgtcctgccttggaagaggtgacaaccgattaagggatgcctgtcttgtggcgctgcgccgccgaaaatggcatggcagactgactctaagagagacctgataccaccttacaaaatatgtaaaaagtggcaagttaatttaatcgatgccggaggaattcacagtaatcctcctaatacccgagcgtctctggtttgatataccggaaacttttagtccgttgaggtcacaatgacagaaatgattgcggcaaccgtgttgctgtttttgataatggatcctttaggcaatttgcccattttcatgtcggtgctcaagcatctggaaccgaagcggcgacgggtagtgctgattcgcgagctgcttatctcacttatcttgatgttgatttttttgttcgcgggcgagaatattttggcgtttttgaacttacgcactgaaaccgtttcgatttccggcggaatcattctgtttttaatcgccatcaaaatgattttcccttccaatgaaggtcactcaaccgacttacctgctggagaagaaccattcctggttccactggcaattccgctaatggctggcccatcaatattggccacactgatgcttctttctcatcaatatccaaatcgcatgagccatttggtgttagcgctgctgatcgcctggggtttatcctcagttatcttgttgatgtctggtgtatttttacgtctgttgggggataaaggcgtcagcgcattggaacgactgatgggattgattctggtgatgttatctacccagatgtttttagatggcgtcagagcctatctcacggcctaattcatcggcgacgacgataaaaacacacaaggggccacgattggccccgataaccaagcggtgccgaagctagactttatggctcagcgccgccacgcagcgacgtactacttcatcaatatcggcatcgatatccacgcaaatcacgtctttctcgtctgccagaggctcttccaaggtttcaaactggcttttcagcagatcggtgggcataaaatgacccgaacgagcttttaatcgctccataatcacgtcaaagctgcctttcagatagagaaaaaccatatctttattgccttcccgcaggcaatcgcggtaacgacgttttagagcagaacagacaataataccggtttcgtttttatggttcaggctgtaggccgcgtcgctcaaacgttccagccacggcattctgtcgtcatcatttaacggatgcccgctggccattttttgaatattggcgcgcggatgcagatcatcaccgtcaataaatttggcgtgaattgcatgagcaacggcttcacccaccgtcgtttttccgctgcccgatacgcccatcacaatgatgctatgtcctgccataagtttgatctctatctcagaatgggaattttaccctgtttgacggttccgtattttaacatgttaccggtatcatgataccggtaacaaatggagatgtgacttttatcacaaagggaagaacaccgggttttgtactcaatcgcgcaatcacgccagcctgtttaaagactgagcgtaataataaaaggaaggttcttatcccgttacctgtcctggataagcaccctaccccactaatttcgcgttgcagcaaaatgagcaatatcaatacctatagctttcagattacagccaaacggcaattggcctccatccgaggagcttagtccgctaagtgaatcgagatagccaaaacagccggtgtcgctgcaacgggaaagagacaaggtacaaagtcagaaaacgccgctgcggcgagaaaaaagcagggtaaataaatcataactaaaagcgataaataggttggagaaatgctatgccattagtcattgtcgcggttggcgttgccatgctgctgttactgatgatccgtttcaagctgaacgggtttatctcgctgattctggtcgctctggcggtcggaattatgcagggtatgccggttgataaagtggtcggctcgattaaagccggggttggcggcacgcttggcagcctggcgctaattatgggctttggtgccatgctgggtaaactgctggcggactgcggcggtgctcaacgcatcgctaccacgctgattgataaattcggcagacaacatattcaatgggccgtggtactgacaggttttaccgtcggttttgccctgttttatgaggtcggtttcgtactattactaccgctggtattcagcattgcggcgtctgcacgcattcctttgctgtatatcggtgtgccaatggctgctgcgctttcggtcactcacggctttctgcctcctcaccccggcccaacggcgattgcgaccattttccatgccgatatgggtaaaaccttgctgtacggcaccttactggctattccaacggtcatattagctggtccggtttatgctcgattcctgaagggcattgataagccggttcctgaaggtttatacaacccaaaaacctttaccgatgaagaaatgccgagctttggcgtcagtgttgcgaccgctctggtgccggttattctgatggcgctgcgtgccgtagccgagatgattttgccaaaagggcatccggttctggcttatgccgaattcttcggcgatccggttattgcgacccttatcgctgtattaatcgctattttcacctttggcctgaaccgcgggcgctccatggaatcggtaatggataccgtaaccgactccattaaaatcatcgctatgatgctgttggttattggcggtggcggcgcattcaagcaggtattggtggacagcggcgttgaacaatatattgccggtatgatgagcggcagcggtgtatcaccaattctgatggcttggtctatcgcggcactgttgcgtatcgcgctgggttctgccacggtcgcggccattaccgccggaggtattgttgctccattgattgccaccaccggtgccagcccagagctgatggttattgccgtcggttccggcagcgtgattttctctcacgttaacgatccgggcttctggctgtttaaggaatatttcaatctgaccattatggaaaccattaaatcctggtcagtgctggaaaccatcatttcagtatgtggattagtcggctgcctgttattggctatggtgatttaattcgctgagtttgaaggttagttcacacaaaaaaggcctgctgtcgaaagatagcgggccttttctttaacgccattattcagatactgccaccgggcagaatagtgaagccgacatcgaccattttgggtgacaccgattcaccacgcagcctggcaatcagacgttctgcacctatttgccccattttttcgcggggagtcagtacgctagccaaacgcggcaccatcgactgcccaatatcatggccgtggaaaccagcaatcgccatatcctgcgggatagataatccctggcgttgacattcgaaaaacgcgccgatggccaagtcatcattggtacagaaaatactgtcgatctgcggataactaacctgcgcttcacgcaacagctcgccaccggcagaataggaagatgagcggctggtcataatactgaccggctctaaacccgattctctcatcgcctgctcgtaaccctgctgcttaatcaccgttcgctcatcctgacgcgcaccgaaatagactacgtgacggtggccctgagtgataatttgctgagtcatctggcgagcggcttcaaaattgttaaatccaaccgccagatcgatgcagggggaaacacaatccatcaattcgatcaccggaataccggacacctgaatcatttttaaggtacggggagtgtgattccgttcggagagaatcagaccgtcgatgttataagacagcagcgaggtcaggcgttgttcttccagctctttctgataaccatagtgagccagcatggtttgatagccgtgaacgtctgtgacgctctcaataccgcgtaaaacctcggcaaatacctgattagttaatgaaggcaataatacgccaatcgcccggctggtggcgtttgacagaatatccggcgcacggttggggatatagcccaactcatccaatgccaccgcaattttcccctgtagcacggcggaaacctgctgcggattacgcaaatagcggctaaccgtcattttcgtgacgccaaccatatcagctacatcttgaagcactggcctttttttcttcattatcaatgaactggcgcaagagagacgggcggggattttaacaaaaaaaagggtataacgcgatgcgcataccctttttagccgataaatgaaggttaaaccggtggcagatcaaataacaatatctcactgtcttcatcggcatgaatcgacaatgcggtttcatcccaaatggcgaaagcatcgctggtgcctgcgtgatgaccattgatagcaaccttgccacgtactacctgaatccagattctgcgctccgcctgaatctgataaacagattgttcatcttttttcagcgcccagcgcgatagcgtcatatcttggaacactttcagagaaccgtcgcgagcatccggagacagcaccaactggcgcccctgtgggttatcaaagcgcttttgttcatagcgcggtggtaaaccattagtttcaggaataatccagatttgatataggtgcaacggctggtcactacgaccattgtattcagagtggcgcacacccgtgccggcactcataatctggaactcacccgcatggatttgttctttattgcccatgctgtcctgatgttctacggttcccgatagtacataggttagaatttccatatccttatggggatgagtaccgaaaccctgcccagcgtcgatcacgtcttcgttaatcacccgcagcgccgagaaccccataaagttagcgtcataataatcagcgaatgagaaggtatgccagctatctaaccagccgtgattagcgtgaccgcgttcttctgctttgcgtagataaatcatattcaattctcctcaacgttttctttagtctagatgtcgcaggaaaatatgaaagcgtaaaaaactcatccctctgttcaaataattcgacaaagaaaaaagcataaaaacaaagcgtgtgcagaggcagaaaatgcggaaatcaaacaagccgttgcgactattccaccgagaaaaggcaaaaaaaaagccagcacccggctggctaagtaaacactggaagcaatgtgagcaatgtcgtgccttcgtcatgtgaacacctaaactttgatggtctcacttgaaagcatgacaatgataatcattatcactctcaactgtaaagcattatttttaatcaatgcgaatataattgactgcgatgaataaaccgatactttgttaggttattcaaacactaatcaataggaaaagccctatgtctcatgcgcaaatacgtccggtagaaccttctgattatttggctctgcaacagctatatgcacatccgaaggtgtatcgcgacaccttacagcttccgctacctgctccggatttgtgggcgaagaagctggggactcccgcgccaggtatctattattacgttgcctgtatcgacggacaaatcgcaggccagctcagccttgagacaatacaaagaccgcgccgcaaccacgttgccaccttcggcattgcagtagacgcgggtttcttgggccagggagttggcagtgcgttgatgaaaaccatgattgatttatgtgataactggttgaacatcaatagaattgaactaacggtattcgttgataatgatactgccgtagcgctgtacaagaaatttggttttgaaatcgagggaaccagtaaacgctatgccttacgcgacggtaaatatatcgacgcttatcatatggccagggtaatagacccaaaataaatcacctgaacacgcaattagcggaactttcctctcacttatttacacatcagcccgaagatcgtgaccgatcgcgtcacgatctgtttccatctctccttgaaataaaacacgacagcgatcacactccgctgccataaatcaacgaaacggcgtagaatactgctcgcttttaatggacagatttccgacagaatagtcgctcacagcgtgaattgatgatgaggttgttgtgtttgagagttatggagtactcaatctttggacgtatgtcctaggtgccattttcattattatcgtgccggggccaaacaccctgttcgttctgaaaacaggcattacccgcggtgttaaagaaggctataaggctgcattagcggtgtttattggcgatgcagtactgatattttgcgcctatgtgggaattgcctccctgatccgctcttcgcctttcctgtttacgctggtcaaaatgctcggtgccatttacctcttgtatttggggcttaaaatcctctacagcaccttggtgaaaaaaggtcagagcgaagcaaccgagatcgtggaacacactttccgcaaagcgctgaccctgagcctgaccaatcccaaggccattttgttctacgtttcgttttttgtgcagtttatcgatcaaagttatgcccacaccggcctgtccttcgtgatactggcggtgattctggaaatgataagctttgtctatatgtcgctgctcatttttgctggcgcagcactaacccacttcctgagtgagaaaaaacgtctcgccaaactgggtaattcgatggttgggctgcttttcctcggttttgccaccaaactggctaccgcagcctaaaacctaccgatataagccgatatcaatagaaatggcgccatcatcaggcgccatttttgttgtgcacagaaaacctccagctaggctggaggttccgtaaagctttcagctttgagccagttataaaaaccccttttgatttgttaaaacagtttgcggtctggcaactgcaaatgttcaacaagaaatcaaaagkgggtccctatgagggatgaaaagagcttagcgcacacgcgatggaactgtaaatatcacatggtttttgcaccgaagtaccgaagaaaggtgttctacggggaaaagcgcaaagcgataggcagtatcttaagaaagctgtgcgaatggaaaaacgtgaatattctggaagcagaatgctgtgtggatcacatccatatgcttctggaaatcccgcccaaaatgagtgtgtcgggttttatgggatacctgaaaggaaagagcagcctgatgctttatgagcagtttggcgatttgaagttcaaataccgtaacagggagtgctggtgtcgagggtattacgttgatacggttgggaaaaatacagccaggatacaagaatacataaagcaccagttggaagaggataaaatgggtgagcaactctcgatcccctatccgggcagcccgtttacgggccgtaagtaatccataaatgcaaatgtcagatcgcgatgcgcctgttagggcgcggctggcaacagagccttataggcgcatatgaaaaacctccggctatgccggaggatatttatttatatccatcggttctttagatgcaaagctagcgggctatttgctcgccagcgcctgtgcgcacgcccaggcggagctccatgcccactggaagttgtagccgcccagccaaccggtcacgtccaccacttctccgataaaatacagccccggaactttatgagcttccatagttttggaagacagctcctgcgtatctacaccgccgatggtaacttctgcggtgcggtagccctcagtaccattaggttgcacccgccattcttgcaacgtcaccgccagcgctgcctgctgaggcacattaagctgttttaaggtgacgtcaggtatctgacctaacagctgtaagcactccaccaaacgtttcggaagcagctgcgccagcgtgttcttcaaactttgattcggatgtgcctggcgctcgctattcaggaaagcgtccaaatcggtatcaggaagtaagttaatgctcacatattcgccaggctgccaatagctggaaagctgaagaatggccgggccagacaggccgcgatgagtaaacaaaatactttcgcggaaactgacgccgttttctgccgtcactaccgcgggcactgaaacgccggagagagtttgtagatgctccagcagaggtttatgcagtgtaaaaggcaccaacgcggcgcgggtcggcaaaaccttcaggccaaactgttcggcgattttataaccgaaaggcgtcgcgcccagccccggcatcgacaagccaccggaagcgataaccagtgaggaagtgctcactttatgttcatttatctgtaattcaaagcccgcgtcgattttctcgaccgccagaatctcgctgcgtaaacggatagttacctgacctgattcgcactctttcagcaacagttccaccacttgctgcgcggaatcatcacaaaacagctgaccgagggttttctcgtgataggcaataccgtgtcgattgatcagatcaatgaaatcccattgggtataacgcgccagcgcagatttacagaaatgagggttttgcgaaagataagccgcaggttccgcgtagagattggtgaaattacagcgcccgccgccagacatcaggattttacgcccagcctttttgccgttatccaccagcaatacccgacgccctaattgccctgcctgagccgcgcaaaatagccctgcggcacccgcgcccaccaccactacgtcaaactgttccactttcggcctctctctgtaaaatcattatcgccgcaaaattgctcatatttcgcaattttaccgcagtgttcaccacaaataaccgaataatcagcggcggaggattgtaaggccctaacagaaagatcgctatagtaagaaaatgttagattcagtaaatcagagtaacttgctgatatctcatggttatgttcatggttatgatgcatctatccacatttatatcaaagaaaggtcattttttccttttccccaacccctattgtcaccgataatgcgccgcgttcatgtccacaaactggcgtaacgcttatgctacatcttttcgctggcctggatttccataccggccttatgttagttcttgctcttttgttcgtgctgttttacgaagccatcaatggttttcatgatacagccaatgcggttgctaccgtaatttacacccgtgccatgcgttcacagatcgctgtggttatggcgggggtattcaactttcttggcgtgatgctgggcggtttgagcgtggcctatgccatcgttcatttattgcctacagatctcctgttgaatgtcagttcggctcatgggttggcgatggtcttctccatgttgttggcggcgatcatctggaatctgggaacctggtacttcggtattcctgcttccagctcacatacgctgattggtgccatcattgggatcggcctaaccaacgcggtgatgactagtacatccgtggtggatgcactgaatattccaaagatgatacaaatcttcctatcactgattttgtcgccgttagtgggcttaattattgctgggttgatggtattcctgctgcgtcgttactggagcggaaccaaaaagcgagctcgtattcacttaacgcctgctgagcgtgaaaagaaagatggtaaacgcaaaccaccgttctggacccgtacagctctgattttatcggctatcggcgtgagtttctctcacggcgctaacgatggtcagaaaggtatcggcctgattatgttggtgttgattggcgtcgcaccggctggttttgtcgttaatatgagcgcgactggttacgatattgcccgtacgcgggatgccgtaactcatttgcagcaatattatcagcaacacagtgaagccttgccgcacgctatcgcgttgaagcctttggtccccgcaccagagactctgcctgatacaccggcgcagttccattgtgacagctctcgcgccatgattgctatcgaccatgcgcaggcactgttggctaacctgcaaagctacgacgacctgactgtggagcaacgcagccatatgcgtcgcttgctgatgtgtgtcgccgaaacggctggcacggttgccaagttaccggaaaccagttctgcggacaggcgtttcctgaacaacctgcgtaaagatttgctggaaaccgtggaatacgcacctacctggattatcgttgcagtagctttggcgctctctctgggcactatggttggctggaaacgtgttgcagtgaccattggtgagaagattggtaagaaaggaatgacctacgcgcaaggggtttcggcccagatgaccgcggcggtatctatcggtattgccagctacaccggtatgccggtttccacgacccaggttctctcctcagccgttgccggtactatgctggtcgatggcggtggcgtacagggtaaaaccattaagagcatcatgctggcctggattcttactctgccagtatcgattcttctttccggttcactgtactggatagcgttgaaattcatctaagcctggctggatgactccacgttaccgcaaataaaaaggcggcctcatcatcggggtcgccttttttagttggctatcatcaaaaatcatctcagtaccatagagccagcgccatcaagctgacaacgaccaagccgcacagggcgctggtgagaatgaactggccgcgcagtctttcacagcgacggataaattccggatcgtggtggtcggtataacgctgggcgtagatataacgcactagccgaatttgtttactgggttgtccgtgagaggtgaaaaaaccgcccccatccacatattgatacagcaatggatcacagccgcgtaacaccactaatagcgcacgtagagacgaataataacgcgccatattcaccacgcacaccacacataaagcccagaaaagcgcgacggtactgatcatgattccccctccagcgatatttcgcgttaacgacacctttgattcgccgttacgccatcgcccgctctagccattacaaccatccccgaggcgcagaaacatgcctctccatcaccttttttatatatgagccgacgctaccgctaaaattttgcctaacccatttaccagtgtaggaaatgaaatcagaaatagcctgataatctctgatttatccggtcacattttgtacgcaactgatgcttttaggcgcaaatttcagtgaaaaaccgccagaaacagctcaaaatagttagtctctcttaacttaaatgcagagataaaagctagcgaaccggcgtttttgatcaatactcactgctttatcagtactataattatggatatagcgagccaaatgattaccggataaacggccaaatatttgacaacagcggtctgagcaataggattaagccgtctattggtgtaaaacagtgacttaagctttaacgcgtacaattaaaagcctgcgttgtgatcggtgaaacacttcgcttatggatcatagtgatagtatctagacatagccttagcgcccgttcagttacctgaatgattgcttacccattaattagcattatggaaggagtttacttatggcttacaaacacattctgattgcggtagacctgtctccggaaagcaaggtgttggttgaaaaagcggtctccatggccaaaccatacaatgccaaagtgtccctgatccatgtggatgttaactattcggatctctataccggcctgatcgacgttaatttgggcgacatgcagaaacgtatttctgaagaaacccacagcgcgctgaccgagctatcccaaaatgcaggttatccaatcactgaaaccttaagcggtagcggcgatttgggccaggttctggttgatgcgattaaaaaatacgatatcgatctggtgctgtgtggtcaccatcaagacttctggagcaagctgatgtcctctgctcgccagctgattaataccgttcacgtcgacatgttgatcgttccgttgaaagacgaagatgacgaataataaaccacgattgaattaatatacatttagaacgcctgcctatgcaggcgtttatcattatataaccccaaatccctttgtcccccgccctaataacttcgttatatttcagtgagaaaacccttgcggtatgattataaagcggtgatatagtcaagaaagacacaacatcgccctctcactatttcgccatactcattccaataagaaatcgttagcggggatctaccatgtacaaaggaatcttttttgatgaatgatttagcctctctggagtcgtttctagaatctttacaacaacgtgatgcccaccagccggaattccttcaggcagtccgtgaagttttcacctccctatggccattcctggaacagaatccgcgctatcgcgagcaaagtctgctggagcgtctggttgaacctgagcgagtcatccagttccgcgtatcgtgggttgatgataaaggtcaggtacaggttaaccgcgcgtggcgggtgcagttcagctccgcaatcggcccttacaaaggcgggatgcgcttccatccatcggtaaatctttcgattctgaaattcctcggctttgagcaaactttcaaaaatgctctcaccaccctgccaatgggtggcggaaaaggtggatccgacttcaaccctaaagggaaaagtcaggctgaagtcatgcgtttctgtcaggcattgatgaccgaactctatcgtcatcttggcccagacaccgacgtgccagccggtgatatcggcgttggcagtcgtgaagttggatttatgaccggcatgatgaaaaagctgtccaacaacaccgcctgcgtgttcactggcaaaggtttgtccttcggtggcagtctgattcgcccagaagctaccggctacggtctggtttatttcaccgacgctatgttgaaacgccacggtttgggatttgaaggcatgaaagtggcagtatccggcgcgggtaacgtagcgcagtataccattgagaaagcaatggaattgggcgcgcgcgtgattaccgtttccgattctggcggcactctggtagatgaggctggctttacgccagaaaaactggcccacctgtctgaaatcaaaaaccaacgttatggccgcgtggaagattatgcccgcgagcgcaatctgacctatctgacgggtgagcagccttggaacgtgccggtagacattgctctgccttgcgcgacccaaaatgaattggatctgcccgccgctcgtcagcttatcgccaacggtgtgaaagccgtcgcggaaggcgcaaatatgccaacgaccattcaggccactgatgcttttatcgaagctggcgtgctgtttgctccgggtaaggctgccaatgccggcggcgttgccacatcgggtttggaaatggcgcagaatgcggcacgcctgagctggaaatcagagaaagtggatgtgcgtttacgtcacatcatgctggatattcaccagtcttgcgtggaattcggcggagaaggaaaacaaacgcaatacgttcacggtgccaatatcgcaggctttgtaaaagttgctgatgccatgctggcgcagggcgtgctttaagttaaggtcggataataaaccccattctggcaaaaacgtcgcgctggaatggggagtttagacaacgaatttaaacgatatcgcctaaggcaaatacagatcgaaacggtgacttttggtcgtaatggcggcctgagcgggcacgccagccaaaggttcagcgtagtcaggccgcttcactaccactcttttggtggccagtgcgcgcgccggggccaatagtccatcagcatcctcatccgcgccaaccaatgactgaaacactcgcatttctttcttcaccaacgcgcttttctgccggtgcggatacataggatcgagataaaccacttctggacgcggatcgagatcggccaacgccgttaggctggaagcatgtagcaaagtcatacgttcctgtaaccagccaccgatttcagggtcctgataaccccgccgcaggccatcatccagcaacgcagccactaccgggttccgctccagcatccggactttgcagcccaaagccgccaaaacaaaagcgtcgcgccccaaaccggcggttgcgtctaccacgttcggcaaatagccttttttgataccaacggctttcgccaccgcctcaccgcgtccgccgccaaaccgacggcgatgagccagagtaccggaaacaaaatcgacaaaaatcccgccgagcttgggttcatccaacttacgcagctccaattgcgttggcgttaacaccagcgccatcgtcgcctgctcgtcagaaatcaaaccccagcgttcagccagaatagataaggtgccgggatcggcaccttcttcacaaattaaacgaatactcacgcgggataatgcccttcagacttaacctttaataccgtagtggcgcagcatagcatccaactgcggctcgcgcccacggaagcgtttgaacaacgtcatcggctcctcggaaccaccgcgagataaaatattgtcgaggaaagattggcctgtttcagcgttgaaaatgccctcttcttcaaagcgggagaacgcatccgccgacagcacttctgcccacagatagctgtaataacccgccgcataaccaccggcaaaaatatggctgaaagcatgggggaatctaccccagcttggtgatggcactacggcaacctgttttttcacttcctgtaaggttgacagaatctgcgcacctttagccggatcaaactcgaaatgcatacggaaatcaaacagtccgaattcgagctgacgcaggataaacagcgccgcctgatagtttttcgccgccagcatcttatccagcatttcctgcggcaaaggctcattggtttgataatggccagagataaacgccagcgcctccggctcccagcaccagttttccataaactggctcggcagctcgaccgcatcccaaggcacaccgctgatgccggaaacaccggcggtatcaatttgggtcagcatatggtgcaaaccgtggccaaattcatggaatagagtcgtgacttcattatgggtaaacagcgccggtttatcaccgaccgggccattgaagttgcacaccagataagccaccggcttttgcagctcaccgttagccagacgcagactgtcgatacaatcgcccatccacgcaccgccgcgtttgtgttcgcgagcgtacaagtccagatagaagctgccgcgcagctcgccctgagcatcaaacagatcgaagaaacgcacgtccggatgccaagtatccacgccctgccgctctttggcggtaataccgtaaatgcgtttcacgacctcgaacagaccttctaccacgcgctgttccgggaagtaagggcgcagttgctcgtcgctgatggagaataaatgctgcttttgtttctcggaatagtaaggaatatcccacgccgctaactcgctgacaccgaagtgttgtttggcaaaagcacgcagctgcgccagctcttcttctgcctgcggacgtgcacgtttggccagatcattcagaaaattcagcacttgctgcggatcttcagccattttggtcgccaatgaatgatcggcatagctttcaaatcctaataactgagccagttcgtggcgcagagtcaggatttcagccatgatttcgctgttatcccacttaccggcgttcggcccctgatcggaggcccgggttgcaaacgcgcgatacatttcttcacgcagcgcggcgttatccgcgtaagtcatcaccggtagatagctcggcatatccaacgtcagcagccagccatccagctctttggcttcggccatcgcgcgagcggcggccagagcgctttccggcaaaccagccagctctttctcatcggtaatcagtttggtccagcccatagtggcatccagcacattattgctgtaggtcgaacccagctcggacagacgcgccacgatttcaccgtaacgtttttgctgctcttccggtaaaccaataccggacaattggaaatcacgcagcgcattctccaccgctttacgctgcggcggagtcaattcggcaaagccggggccttctttcaggctgacgtaagcctgatataaacctttatgctggccaacccaggtgccgtattcagacagcagcggcaggctttgctcgtaggcggtacgcaattccgggctattttttaccgcgtttaaatggccgacaggcgaccagatgcgagagagacggccgtcggattctgccagcggctggcacagattatcccaggtgaaaggacccggttgggccacaacccgctccaccgattgacgacattcatctaaagcggattgcaccgcaggcacgatatcttcagggcggatagccgaaaacggcggcaaggagaacggagtcaacagcggatttgtcatagggtgtcctgattatagttgtcgtcctgacgatggtttactcatgattttcctaccgtcagatgataaatgcggatgaacatttaacatgaggtctgtcgcgcggaaaatcaatggctggcggcatcattccctttgatagataatgctgcctaagccgcaggagaagccgcaaatgttaagttatcgccacagttttcacgcaggcaaccatgccgacgtactcaaacatactgttcaaagcctgattattgagtctttgaaagaaaaagaaaaacctttcctttatctagatacccacgctggcgcaggccgctatcagctaagcggcgagcacgccgaacgcactggggaatatctggaaggtatcgccaagatttggcaacgagatgatttaccggctgatttagctccgtatatgagcgccattaatgcgttgaatcacaacgggcagctacgttattaccctggttcgccgctgatcgcccgtcatttgctacgtgaatatgacaaaatcagcctaaccgagctgcatcccagcgattacccgatgctgcgtaaagaatttgccaaagacgaacgctccaaagtgcaacgcgccgacggttaccagcaactgaaagctcagttaccaccgcagtctcgccgcggttttgtgctaatggatccgccttatgaaatgaaaaccgattatcaggacgtggtaaaagggattcaggaaggttataagcgctttgcgaccggtacttacgctttatggtatccagtggtattacgccagcaaatcaaacgattactgcgtgaactagaagccacgggcatccgccggattctgcaaatcgaactggcggtacgtccggatagcgatcaacacggtatgactgcctctggcatgatcgtaattaacccgccgtggaagttggaaaaacaaatgaccgatctgctaccttggctgcataaagcgctagtaccctctggtcacggccacaccttggtaaaatgggtcgtgccggaataatcgccgcgcctttcgctcctggccgggctgcaatccatgctgtccggctcattcaatattacccaatttttatcaccgtttagcgcaaaagctttctcgtcttccaacacctatcacagccatcgatgcaatctttgcgacaaagtgggatctggcgttaaactctttgcttctataaaactacactcatggaaatgatcctgatgaccaaacattacgattatctggcaattggcggcggcagtggcgggatcgcatcgatcaaccgggcagccatgtacggtaaaaaatgtgcgctgatcgaagctaaacagctcggcggcacctgcgtcaacgtcggctgtgtgccgaagaaagtgatgtggcacgcggcacaaatcgctgaagcgattcgcatgtacggtccggactacggttttgataccacggtgaaccacttcgactggaaaaccctgatcgccaaccgtaccgcctacattgatcgtattcatcagtcctacgagcgtggtttaggcaataacaaagttgatgtgattcagggcttcgctcgctttgtcgatgctcataccgttgaagtcaacggcgagaaaatcactgcggatcacatcctgatcgccaccggcggccgccctagccatccaaatattcccggcgcggaatacggtattgattccgacggtttctttgagctagatgaaatgccaaaacgcgttgccgtcattggcgcgggttatatcgccgtcgaaatcgctggcgtactgaacggtttaggcaccgaaactcacctgtttgtacgtaaacacgcgccgctgcgcagttttgatccgctgatcgtagaaaccctagtggaagtcatgaacaccgaagggccaaaactgcataccgaatccgtgccaaaagccgtgattaaaaatgctgacggcagtctgacgctgcaactggaaaacggcacagaagtgaccgttgatcatctgatctgggcgattggccgcgaacctgcgaccgacaacctgaatctggccgcctgcggtgtgaaaaccaatgaaaaaggctatatcgtcgtcgataaattccaaaataccaatgtaaaaggtatttatgccgttggtgacaacacgggtgcagtggagctgactccggttgccgtggctgcaggtcgccgcctgtccgagcgcctgtttaacaacaagccagacgagcatcttgattacagcaatattccaaccgtggtattcagccacccacccattggcactattggtttaaccgagccgcaggcgcgtgagcagtttggcgacgatcaggtaaaagtctataaatcctcctttactgcgatgtacagcgccgtcactcaacatcgccagccgtgccgtatgaagctggtatgcgtgggcgcagaagagaaaatcgtcggtatccacggaatcggctttggtatggatgaaattctgcaaggtttcgccgtagcagtaaaaatgggcgcaaccaagaaagacttcgacaataccgtagctatccacccgaccgccgcggaagaatttgtcactatgagataatcatttagagatgagtttctctatttgagtcatggaacgtgaagccgaaatgcaaatttcggctttttattgcttggaattcagcttcgctacaccccctctcctttcttacagctatatcaccaccgtctacatcagcgcgattaaatagaaatgacgataaaaagaggcgttgagtcacttaccgagtctgaacatcattgcatcttacaacatagaaacttgatgaatacataaagacagtgtatgaaaattgacatatagaaattatcaatacttactgaggtaacgatcaaattgcatttattcttacttgttcgaattacccagctctaagacattaatcaggtcgaaaaaataaattaaataccctttaaaatcaaaatattaaaaagaaaacctccggcgggaaataaatttaaataaactatcacttatataaaataatatgaaaataaaaagaataattaagtcaatgatgattcacaaaattaatttattgatgcgatactttgtttctaaatttatcccaagcgaatcagataactttattttctttttattactcacgatcaatgagaataaatagctcatgaaaatatattcgccgttcgcagcggttaatttagaacctaaaaattcatttaaaatataaaaaggaacatctatgaaacctatcaattgtaaaaatagtctgattacgattctgactctatgcaccctgtttggtttttctcattcctccgcgtttgccgcctcggttaatgatgacgcgtcggttatgccaagcctggtaaataaaaagattatggcgggtttctggcataactgggacagccaagaaagccgtggctatcaaggtggttatccgaagaatctaaaaataaacgaaacacccgcggcctttaacgttgtcattgcctcctttatgaaaggcagcggtattccaacctttaagccgtacaacgcaacggacgcagagtttcgcgcacaaatcggtgagttaaataaacaaggccgcgctgtgctcatttcattgggcggcgctgacgcacacgtggcattgaataacggtcaggaacaggctttcgcagacgagattattcgtttggttgaaacctatggttttgacgggctggatatcgatctggaacaaacggctattaatgcagctaataacaccaccgttattcccgccgcgttgaaaattgttcgggcgcattacgaacaacaaggtaaacactttatcatcagtatggcaccagaattcccatatctgacaaccggcagaccttacactacctatatcaacgccttggacggtgtgtatgactttattgcccctcagctctacaatcaaggcggtgacggcgtatgggtcgaagaagtaaacctgtggctggcgcaaaacaatgacgccaaaaaatatgaattcctgtattacatggccgattctattgttaatggcaaacgcggcttcattaaaatcccagccaataaattagtattgggtttaccaagtaacgttgacgctgcggcatcaggtacggtaaaaaatccgcaggacgtttatcgtgcctttgctgatttagagaaagcgggaacgccaatcaaaggcctgatgacctggtcggtcaactgggatcagggtaaagataaagcggggaatgcttataatcaggcattcgccaaggcttataccgacttgattcacggtaaataatattaaccgctcataaagttgttccgtaaggcagttttattagcctggggtacaaatctacagccggagctcttgttccggctgctttatatcaatactcttcaatttgcctgaatgcgaaaataaatatcagccaattaatcgattgaagccggcttccaaatcagcaattaaatcatcgacattttccagtccaatatgaacacgtaccaaagtaccctcaaaacctacgccgcctaccggacgaatttcgtccagttcttccggctgattagccagaatcagagactcaaatccaccccatgaatacgccatgctgaagtgctcaaaattatccagataatgagccacttgctcatcactgagacgagatttcaacacaaaggagaacaatccgcagctcccagtgaaatcacgtaaataaaactcatggccggggcaggatggcagtgctggatggttaacctgcgccacttccggacgagcggccagccatttggcgatctggatactgctggtttcatgctgctttagccgtacgcctaaggtgcgcagaccgcggctagcaacgtaagcggtgtctgcatcgaccatttgccccagcaaatacgaatgttcccgcaattgatcccaacagcgcgcattagataccgccgtgcccaacatagcgtctgagtgaccgacgatatatttggttccggcctgaatagaaatatcgatgccaaactccagtgcgttaaatagcactccggcagcccaggtattatcgatcataatcacgatattgggattaactgcccgaatagcctgcaccatgccgggaacatcctgaacttccattgtgatggagctgggagattctaaaaataccactttggtatttggctgaataagctcggcaattccagcgccgatcagtggagaataataagtggtggtgacacccagtttggacagcactttattgcaaaaatcctgcgttggctcataagcagcaccggtcattaatatatgatcgccggtggccacaaaagacagaatggcattggtcaccgctgcggcgccgcaaggataaagcgcacaacctgcgccgccttccaattccaccatcgcttcttggaaggaaaaatgggtcagcgtaccgcgacgaccataaaacaattcgccttttgcccggtttgctgtggcaaattttttcgcctttacggaatcaaataccagggaagaggctcgttgaataatggtgtttaccgatccttgggtaaattttttcgcccgaccggcagtcactaacgctgtttctaattttttagatttcattattttttccttttctggtgctggcatactcaaatattcacagcgacttacggacaatccgccacgctgtgtcgttatgtattaacaagtaggttcattcaccgcaggaagctcagcctgccgcttggaggattttttaccggtatatctttcgataatttgggctgcattaaggtcatgaatgacgttaattagcgttgcaggtgcatcggtaatggtgccaataacaaccagcattggaatagtttcaaccggtagccccagcgtggtgacaataaatatttcaccgaggaaagcgccaccgggaacgccgccgacaataatggcggagagcaccgaaatcagcatggtcaggaagaaagtctcggtggtgaaatccaatcccagtaccgagaagataaagacgattttcagcgcggcaatcattgccacgccgcctttatttaaattaaccaacagcggcagagaaatatctacgatttcagggttaatgcccatcgctttggccgctcgaatagtcactggcagcgatcccaatgaagagcaggtgcctaaggcggtggctgaaggttcaatagcgtgttgccagaaagcccttaccgctttcatgccgccgccaatccaggaataaaagatagagccgaaaacgtaatacagcagcgaggcgataaagaataagccgatggctctggcgaaagtcatcagtaattgtggatcctgactggccatcgtcgcggcgaaataactgcccaaaccaacgggtgccgctttcatgatgattgagacaatcttcataatcacggtatttaagcccaacaaagacagggcaatttgtttaccttgctcgcccgattgcccaatcgcaataccggcgataaccgacataataatcagcgccagaatattggatttagacaataaaccaacaaaatcattagtggtgaccatattcacaaagttcatttcgccgctgccggccttgaactcttgggttaattcaatagtgacgccctgagccggatcaaataaggtcgctagcccaacgattcctgccgccggaatgagcgccataatgatagagactgcaaaaatcagccccattatgcgccccagttttttcaaatccgtcataccggcaatggacgacataacgcttacgctcaccaatggaacgataatcataaacagcaaattcaggaaaattttaccgataggctgtaatttgagagccagagaaggggcataaatacctataaccccaccgagaatcagtgcaaataaaagaataatagaggacttgtagggttccaaacgtttccacataggattttccttggtgtattatttaaatttcatgtgacttcagtcaccttttatttttctttcggcaagcaaatatcttatctgtgattaagctcacctttttatttcttattcttaatatgaataacatatcgctattggtaataaatgattacatttgtagtctacaaatgaaatacgacattgatgccatttactaaaatcactaatgagctgaaggaaagaatgagtaatatcgcatcgctaaaacagctggaaatactggtcaagatcgttgagtgtggtgggctgtctgaagccgcagctcagctgaacatctcgccttctgcggtcagcaagagtctgtctcatctggaatcacagctgggcactatgctgctaaaaagaacgacgcgtagcctgacgttaaccgacgcggggaaatatctttatcatcgggcaactaaattattattagattttgacgaatctcttaatactaccgctggattttataaccacccgcagggtgaattacgcctcacctgttcaattgcctttggttattctcacctcatcactttggttaataaatatcgagagcgttaccccgatgttgagttatatatagatctaaacgataactttgttaatttaaatgagagtaactttgatatcgctattcgcgttgcatcaactccgccagataattattcgttaagaaaactgtcgactatccactgggcttattgcgctagccccacttatctggaaaaaatggggacaccaacttccgtccaacaattatcagaccatcagtgtttgttatatcccggtttgacaccggtattaaaagataccgacgaaagcggcagcgctcatttacttaagttacgctcaccgattcaggcaaatagcagcctggtattgctgaaagcggtgctggaacatcagggtgttgcctatttgccgacttatttactcggcgatgctattcaacgaggtgaaattactcctctggcgcttgatggggaaataacccacgcgactcatggcctgtatgccttgtatttccccagccgttatagcaatcccaaggttcgttcttttattgattatctggtggaaactttgcagcccgtaccggtatgggataattggatcacccgaaggccctgacgttaatgacgaattaaatgaggcaatcaggatgaattgggctggctgcaatcccttttgtcgttctctttatcggcctagcctctgccttagccgccgtttgtgataagccatgactctgctatcatcaacagagttagccgtctttgtaggatattctgtaggataatcatctgcataaggcatgaatttaggccatgaggaatattatgccgaactcattcaaggataatcagacttcatccagcgcagatactgattcgcagcagagcaaaacagcgccgttaagtgcaggaattgaaaacggaaaaaaagctatttccgtattaacccgtcttggcaatcggattaaaacctatcccagtgttgcgcatattattcgcgctaccgatcgctttaacgatcgattaggcagccagtttggcgctgcaatcacttatttttcctttttatcgctcattcccattttgatggtttctttcgccaccgtgggttttgtattggcatctaatccagatttgctggccgagttgatcaataagatcgtgaatagcatcagcgatcccagcctggctgctaccttgaaaaatacggtaaataccgctattcagcagcgtactaccgttggattaaccggtttagccattgcgctttattccggtatcagttggatgggaaatttacgagaagcaattcgcgctcagtccagagacgtttgggagcgtaatccgcaggatctggaaaaattttatgtgcgctacacccgtgattttatttcgcttaccggtttggtgctggcgctgattattactctctctcttacatcaattgccggttctgcgcagtctgtgattgtgaatgcgttagggctgggtgatattgaatggctacgaccggccatgacgctaattgcgctgtctatttccatcgccgcgaactatttattgttcttatggatattctggattttgccgcgtcataaaccaaaaaagaaggccttgctgcggggaactcttattgccgctatcggcttcgaaatcattaaattcattatgaccatgatgcttccgcgtcttgccagctcgccttcgggcgcggctttcggttcggtcatcgggctaatggctttcttctatttcttcgcgcgtttaaccttattttgcgccgcctggatcgccacggcgaaatataaggatgacgaaaccttgcctgaacgccatgcctaagcggctgtcagatgcccgccgtcaacgtgcgagaggtttttctcctatcggcgatgaagcctttgccgcgcgttggaatttaaccctatactgctggctacttaatcgatcatggagggtcagttaatgccacttttatcttatcgtcgatggattgctttgggcgtattggtactgatcgccgccattgcggtgtatgcgctgcaacccaaaatcgggaatccagatgctctgtggcaaattgttagccaacagtgcgttccccatcagcgccagctgaattcccctcaaccttgcgccgaagtgaatactcaggccggttttgcggtgtacaaagaccgtaacggaccgctgcaatacttgttaataccaactgaaaaaattaccggtatcgaaagccccgagttgttatccgcagcaacgcctaactattttgctctggcatggcaagccagggattacatggcgctaaaatacggtcatcctattgataatcaaaatatctctctggcggtgaattcagaattgggccgcagtcaaaatcagctgcatattcatatttcctgcctatcaccgaaagtgaaaaaagcgctggcagatcaaagcgattcgttccgcccaagctggcagccattgccgaaaggattgctcggtcatgattatctggcaaggcaaatcacccccagtgaactccaggaacaaggcgcgttccgcctgctagccagcggcgtacagggcgctgcggaaaatatgggcaaatacggcttagccatgacctctctgcccaacggcgatttcttactattaaccacgaaacgcgatttgaccggcctgaatcttgcctcggtcgagagtatccaggaccacagttgcagcgtgctgcccgtgcctcctcactaaaacttacttctgcttcatgcttttcagcagcggcgtgcattggttttcttcaccttcactaggcgaaatcaatgccaacaacgccgccgctggcgttaaagccacgcccaacacagccgccaccgcaccgcgagcaattaacggcccggtcttcacacccgcgtccggatttttaaacgtgcctttaacgtacagaggcgaacgcaacgtcagaatacgtaaccctttgctttgcgggtcgattgagagatccaaccgttcggtggcgaaattagcattaccggtaatattgatgatggcattttccgtgtcgaagacgaacagccgcggcgtagccagaccgtttcgcatcacgatatccgcagcagcacagttaatttttacttcgtcatcaccgaagagttttgccactatgtagttacccacgttcagccccaataattccatcaggctgcggctgattagcccctgattcagcaatattcgcaggctaccattactggttcccaacagcgccgccaccgagttaccccgagccgtgaaggaagcgtcgccattgagctgccccagactgttacgcatcgactcgacttccggcagcagctgctttaactggaatcgacgcgcgtgaaggtcgatgcgcccttgcatcggatttttattaccattcaggcgtaaagtggcgttgagattgccaccggcaataccgaagcgcagcggatcgagtaacaactcaccgtttttcatcaccacatgagtagaaagatcgctgataggtaaggctttatcccgctcgatacgtttagcggcgtaggtcacatctgcatccataacgttccagctttgggtttcaaaagcctctaccggcagaattttatcggatggctggcgacttttctcaccgcgcccttttttctgttgattggaatcagcgccgattaaaggagccagatcggcaaaacgcagttgattggagacaacctttcctagcagtttgggtcttggctgactggcggtataggtgagatcgccgtgaatatcgctgtcgccgattttaccgttgaatttttgatactgataaaccgcaccgcccgattgacgcaaccgagcaatcaaatacccatcggtggcataaggtggtgtattcggtaaaagtacaccaatcaacggatataagttacccagactatcgccggagaatttcagccgtagattgatatccgccagattgctcggatcattgagcgtaccgacgatagccactcgcgtagagccggagcgcacatctgcctgaatagggaaaggaatatcagcgttagtcagagaaagcatccccccgatttttccgctgccgctcacaggttgcccttggtatttgccttctacctgccagccgaaaatataatccaccgacgtacttctaaccttgctgtccttcacttcacccttgtcgccaatcacttcggaaaaaggaagaggcttgcccaaagggtcgattttcgcccgtagatccgctttcaataccgaatctttaagcgaaatctggccgcgatcgaacacaatatcgctgatattcaccgaccaatcggaagatgcttcacccttagctttgtcgcgattggcgagattaaaggtccagttgtttttaccgttggccaagcgctgcaaattagcatcgggttccgtcagccaaattctgggaatgcgaacctgcttacccaacaatgccagtggagacaaattagcctcaactcgctttagggtcatcatattatccccaggaatatctggcgggttgccgagtaccaaatcttctgcatgaatctgcggccagggaatccaggcacgccaaccgcgatcgtccgttttgcgcgaccagtcaacgcccaattcgccacgaatggcaaagggacgctgcaattcagcactaaccttttggtttattgtgggttttatgcgattccaatcgaacgtaagaacgaaaatcactaaaacagccagcaataccagcacaattccggccacccaaagcagtaccttcccggtttttgtcataatcgctccacaaaatttatcagaagctaaatccggttcggcaataaacaaaacggctatgggtactaccgctcagcctgtcaatgtagaaaaaagagttaatcgatgaggaacgcggacttagacgcttgtattaaccatagttgaggatcaactaacgtccattattattggcctgatgaaaagcagccaatagatataaacgtcaatttatcagacggttaatgatcaaacgactcatcggttttgacgattatttcacccggacgttacccggcgaataacaggggaagtgactgtaaagtatcaaaatgtgcgggtctggaaagatagtaaccttgcgcagcacaggcatcagatcgtttaaccagcgcccattctttgtcagtttccactccttctacaatcacgcctttactgtagcggctcatcaatgttaccagcgtaaagaacagctgctgccctacctcactttgctgtaacagaataaataaatcgcgagctattttgatgtattcatagcgccaactgacaaaagacgagaagttagccacaccgctgccaaaatcatccagccataatcgatcggcctcagcgatttgagcaaacggagtaatacaggcggtatccatatgttcgaccagctcaaaacgcacataaggcatagaatcaataagctgccgcgcttcgggatcgttttgcatctccatcaatgcctgaccgtcgatattgatcgataccaacattgagcgatgggtaaaaataccgtgccattgcttcactaattccaactgttctaacaccacgttcagacgcgcccgaatgctgatagaggagaaataatcctctggtgagagtcgggtttccggcgaggagggatgataaacagccgtcaataattctatcgccagtaacttccctgaagtgcgataaataggttggaaagtatacctacgctgacattgccgccaaaagttgaatcccttattacaatcctgagcggcaagggatggcgcaagtaaatctgatattttgttagttagcatcagttttgtcgccatatgtcggggtatcaggcagtcaaagctcatactatgcttactgccataaagacgctccccaatgagagcgttcttccttctggagatgttatcgactcgttcgaccagaactttatatgtgagccaggcagattctcaaaactgcgaaatcgcctccaactgagcaacgaacgacaaaccggcaaacgtgattgagttaacgctaacattaggataaatggagaaaataatgccatacgtaaatattaaaattacccgtgaaggtgccaccgccgaacaaaagaagcggctgattgccggtgttacgcaactgttagtcgataccttgggcaaaaatccggctaccaccgtcgtggtcattgatgaagttgataccgataactggggtattggcgggaaatgcgtaaccgaactgcgaaaagccccctaattttaacggaacaaacgggaaacctgtcagtttcccgacctaggtcataaaaaatataaaacgccattttaattctattgactcacgcagaaccagcagagagactaagcctatatccctcatatcgagttttctttagaaataggccgctttccatgaccagcaaaaagattgccgttatcggcgaatgcatgattgaactgtcgcaaaaaggtaacgatttgaaccgaggttttggcggcgacacgctaaatactgcggtttatattgcccgtcaggttgacgaagaggcgctggaagtccactacgttactgccttgggcgctgacagcttcagcgaagacatgttggcggcatggcagaaagagaaagttaaaatcgatttgattcagcgtatggatgataagttgccgggcctctattttattgaaaccgacgagaccggtgagcgtactttctattactggcgcaatgatgccgccgcccgtttttggctcacggggccgcaagctgataaaatttgccagaagctggaaaacttcgattatctctacctcagtggtattagcctggctattctggacgcctccagccgccagcgcctgttgaaactactgcaagcctgtcgtaccaatggaggtaaagttatctttgataacaactaccgcccgcgcctgtggcagagcaaagaagaaactcaggaagcctatcgcgctatgctgtcctgtactgacaccgcgtttctgacgctggatgatgaagatatgctgtggggcgagatgacgctggagcaggctatcgatcgcactcaagctttgggcgttaacgaaatcgtgatcaaacgaggtgcagattcctgcattgtctggaatcgggaatccgatagccagcggcccgcggatcaacatgtggtacccgccgtaaccttgccaaaggaaaaagtcgtcgataccaccgcagcgggagattcatttagtgcaggttatctggccgttcgcttaaccggaggcacacctcagcaagccgcagtgcgtggccatttgacggccagtactgtgattcagtatcggggggcgattattcccatcgcggcaatgccaaaagtctaagccaaacgagatgtattgacgggagagatagaaacaatattcgggaccagaaaggccccgaatatctgatttgaacacccggttttactgcgcggtcgaagcttccggcggcgtcccttctggcgtggtgccttcttgcgtcgttccttctgacgcaacgcctggcgtagcttccggtttcacttcttccggcgcagccattggcgtacccgatgtcataatgctgttatagctttcctgcaatgctttcacgctgacttctggctcacctttcggctgaaccagaaccaaagtggtatcttgcgaaagctgttgttttagctcctgattcagattggccaacgttaagccggacaggaaggtttgtcgcagcttctgatattgctcaggtgcgatatccactacaccgctctgctgagaacgcaggcgctgactcatcaacacatcggtatcagtacgggcataagtcgcgaacagcttgcttaactgatcgtttttctgcgccatcagtccatcaaattcagcctgactcagcccattagcacgaatactggctaattcattagcaataaacgtcatgccggaattcagattttccgttggcgtattcagatgaatcgcacactgagcacgttggtattgcacccggcaatcaaagcccagcttcatattcttctgaccgcttttttccaacgcctgctgcatatgccagaacagcgcttctcgcgctagatcactgcgccaatagcggctaagtgcctgggagtcctgtatcggatgccacggggtatcccaaattagcgacaaagtgtcctgcgtcacctgctcgctcatcaggttcaccggctgaggcggtaaaggagccagcatcgcgatagaagacggggtctgtcgcttcccttccaacgaagagaaggttttactgatttgcgccaccaaactacggctatcgacattgcccacgacatacagcgtcatcgcatctggcgtgtaccactgtttgtagaattgcttcagtttttccgcatcaaccggaccatttaccggctgcccaggatcgtgacccagcagtgaagacccttttaggcgatagcgccaccaagtgtcctgtacattttgcgggaaagtagcaatgggatcattaggaagattcagcgcagcattcaccgtttgctcgctgatggccagcttaccgctggtatcagatagccaagccaaagcctctttaatcaaatcagggcgattgtttggcaggctcaggctgtatagcgtgaaatcataagaagtaatcgccggtggtaaagggcgctcgttatcgaccccttgctgccacagcgattggagttgtgccggagtaaagctctggctgcgaataagcgccaaacgaggtaacagatgggcaaagccaacctgctgtgcgctttccgacagagatccggtattgaccaccagacgcatctctactctatcacttgggcgctgcggcgttgccagcagctgccatgtaaacccgttttctaactttccctgctgccaggcaggatcgggttgtagtgcttcagcttgcacattgccgctggccgccgccaacaacaatccaccaactataagacgaattctggtgccctgcatgtgaacccctacttaataactatccaatttaaaactatccaactttcaaagaaattacacgctcaaaacagcccaatgatacgaaactcatcggcgtgtgcttatgttggataaaaaaactacgctcatcacagttatgaccgcggaaaaagcaagtgtaccattctgttagaccgcatgcttttgccgatatcacccatcactgcgaaaaataatgttcaacgggcaatacgagcgaaaaatggtagtgattgactatgcagaaaccaccggtaacgatgagctaccggtggctgattgactaatctggtgacctaaaagaatcaggaagaggatatctgcccttctgatttacctgccggactcttattcgacaatgtcgcctgcagttgatcgttatccaactggttacaccatttcgcgaccacaatggtcgctacgccgttaccgaccagattggtcagcgcccgcgcctcagacataaagcggtcaatacccagaatcagtgccaaaccggccaatggtaaatgtccaacagcggagatagtcgcagccagaacgataaagccgctaccggtcacgccagctgcgcctttagaggacagcagcaataccaccagcagcgtcacctgatgcatgatatccatgtgggtattggttgcctgagcaataaataccgccgccatggtgaggtaaatggaagtcccatcgaggttaaatgaataacctgtcggaataaccaaacccactacggattttttacagcccgcacgttccattttctccagcatccgcggtaatacggattctgaggaagaggttcccagaacaatcagtaattcttctttgatatagcgaataaatttgaagatattgaagccgttagcgcgcgcaatggagcctagcaccaccaccacaaacaaaatacaggtagcgtagaagcagacaatcaattggcccagttgcaacaacgtacccacgccatatttaccaatagtaaacgccatcgcaccgaaagcacccagcggagccaggcgcataatcatattgatgataccgaagattacgcgggagaaactttcaattacgttaaagataagctgacctttttcgcctaaacgatgtaaggcaaaaccaaacagtacggcaaacagcaagacttgcagaatattaccgctggcaaaggcgccaatcacgcttccgggaataatatccaacaggaatggaattattccttgctgagaagcttgctccgcgtacatggcaaccgctttagcatccaaagaggcaggatcgatattcatccctgctccaggctgcaccacgttcacaataaccaggccgatcaacagtgcaatcgtacttacaatttcaaagtaaagcagagcaatggcacctgttcgcccgaccgctttcatactttccattccggcaataccggtcacgacggtacaaaaaataaccggagcaataatcattttaattaatttaacaaatccatcgcccagaggtttcatctgagcaccgatgtcaggataaaaatggcctaataggatacctaacgtgattgccgttaatacctgaaagtaaaggcttttaaagatgctggttttcatatcaatgtccttttggagaatgcacggcaatgtgtcgttatggtctccgcaaatgaaagggacgcttcatttttctatccgcgctagcgcgaaaaataacaccccaataacaatatgtaagtcatttattatcgtaaattgtcccattaacacgaaactaagaactgaaacgcttcaagaaaaggtaactggagtggagcagtgaaatattctttgctaccgagccggtctgagagacctgataagggaaaggataaataagagaaggtggggatattgcgaaccaacgttgaccggacaaacccgatcaacgtggcaggaaactggcctcaaactcttcgcgcggcaccggacgggagaacaggaaaccctgcccgctcgtcacaccgtggtctaacaaccattgacgctgagcttcattttctacgccttcggccatcacgcgcagtttgagcacattggagatactgccgataattcgcgccatcgcatcatcctgcggtagcgtgtggacgaaacttttatcgatcttaatcatgtcgatgggcagacattttaggcgattgagataatgcaggctggaataacccataccgaaatcatccattgcgatggaaacgccgagttcatgcagctcacgcaacagtagcaacgcctcatccagatcgggaatacgggcagtttcggtgatttccagcattaactggctggcatcaattttgtaatgactgaggatagttttgaggtgcggtaaaaacgtctcatgctgcacctgcaaaccggaaatattcaccgccaagggcaatttaatgccttgtcgctgccagtctgccagtatccggcaggactcttccaatacccaattacccagcggcaccataatgcctttttcttccaccagcggaagaaaatccaccggcgagaggtaagtaccatcggcctgattccagcgcagcaacgcctccgcgcctatgactttttcattacgcatgtcccactgcggctgtaggtgcaatataaaatcacgtttctcaatggctcgaagaatgtcattttcgtaagtcagatgcttttgcgttttttccgacaaatgctcttcgtaatagagaatctgatttttacccttatggtgggctgccaccatggcagagctagcactgcgcattaaatcttcagcgctttcatgctgattaagatattgcacgatgccaatactggctttcggacgcaactgcatgttttcaaaggtcagaggagcggtaatctgcgccataatccgccgggcaagctgcatcgccgggaaaggtcgcgatatctcttttgccatgacggcaaactcggttttactcaaatggcccagcaagcagttctggtcaatgcactgctcaagctcctgcactatggtcagcaacagctgctcatgctgatgttccgtcatgacgccggacgcttcatgcagcgtttctatgccaataaccaagaggtgaaatttttctggtcgaacaggggaatcaatgtgctcattcaacatggctaaaaacagcgtgcgattcggcaattcagtcaccgggtggcggctgctgatacggctcatttccgcataggctttcgctaacaaatgctggttacgattataatttcgcgccaatacccctaattcatcatcaagatgacgagcgggcatggaaagctgatgatctaacacctgatcctgagagatattctccagttcacgagccattgagcgcaatggatgcacgattaaccggttaatacaccatgtaattgaaacggaaagaatcaatgctaacaacagataggttgaaagcatggtggataaggtattaagaataaattgataaatacggtaagaatcagcctgtaacaccagataagccaggggcttagggttggcggggactctttctaatgaatagagcggaacggtaatttgcaccggcagattaaatacccggttaacccaattgggtaccggctgctctggcttaaaattagcgtgtaatacctgtagctcattaggcaacaccacatctgcccgactcaaaatcccaatcggcaatgtgctctccagcacacgtttagcacctggaatatcgacgctgagtatggccgaagaaagggggtttttaacggaatacgcgatactctccaactgcttggcgtagtcatctttgcgctgctgcacaaaatggaacagttgaatgacaataaagatacaaatcgtcaccagcgccacaccggacaccgttgccatttgctttatcgttaacgaatgcctaacccgcaaactttttctccgcctatcgtacccgtaaaaaagcggctttatcatcaagccaaccgccaactcagtctgagtatactcgatcgtctgccgattttatcttgcgagactaaactgatgggcaagaatatcgcgggttttggcgttttcctatcaggatcctgctttttatagcgtaaaaatcacttttagagcagtttttcaccaggtaaaccgccccgaaagattatttaaaatcggcgtaaggtaccaacggctgcggcggcatatccagatcgccctgccagcccgccattgagtatcgcagatacaccagtgcatgacttggggtgtagtctttcgcctgctgaatatcaataccggcacccagcgtccagtgagaactgagtcgccgctctatcagcgctcgcagggtataacccacgccgctgctgctgtcgccgaactcggttgcgttgcgatctctgatttcctgcaagcttggcgacaataaacctttcagcggataacgcggctcatcgctggttgccgaatgagaaagagaaatcgagccacccagttcccatgaccagttttccgtgcgctggcgataattcaccggaatagccacagacaggtatttttgcggactgtaatagcccccttgccccaaggtgtagccgctgaggtctttttgatagtgccaccacattccgttcagacccacggaaaggcggcggttatcttcgttaatcagcttgtagtaatagccggtcatcaaacgcaggcgttggttatccgcaacgttttgccccgtcagataatggtaactgacatcgctccagactccgtgcgcttcgccacgatcgtaactggtacccaagctgacgccgttggcgcgaacgccgccccaggtcacattggtattgggatcttttgttccggcaaacgccagtaatgaactggaaatcgggcggcgagatgccgttgctgtccagccaatatggttccaatcgctgctataactgacgccaccgaccacatcaaccacatcaaaacccatcggagtggtaccgatatccgtttcccagctatcgttttgccaaccggcggcaatactggtaccggttgcccgctggcgcatgttagctacacaaggattttcaacgtcatagcaggtgccagccttatagcgttcattggcattgaaagtacctgcatccatttgaatggtatcagcacggaagaacgcccgtccatcagacagcggcgtatccacctgtaacatggtgttgtgggcattcagatcggaaataccttctgttccgctggaacgaacataatcatgatccagcgtgacccgcgtatcttgttgacgatacaaatcggcggcatcggaacggataccgcgtttcagccagtcatccgtagcctgattgcgcgtaagaagcgtgtagctgtcgttatccgctggcagcgttggcgtgatgccgctaccaaccatggcccgcttataatcctcctgcgccaactgcggatcgcccagtttttgcgaaagacgcgccgaatcacggaacactaacgcgttagcctgagatgggccttctttctcagcctgtggtttaagctgctggaagatggccgatgccttttgtggatcgcccacgccgctccaggcattcgctacacgccgctgggtatttagtgttgcatctttcgccaccagagaatcgccttgcagaagctggcgcgcatcgtcggttttcccctgagccaccagcgcttcgatttctcccaaacgagcgtctggattattgggttcacgaacacgaataccgcgatagccggctagcgcctgcgcgtagtcgttacgctccagcgcccagtccgccagcgtcatatcaatacgcgtactcggcggctgctgacgtaataaagctatcgccgacggttcatccccgccagtacgtagccgttgggcattttccaatactcgttcgaattgaagtcgttgatccaattcgcgaatatcatcattccattggcccttaggaagcgtggccaggtggctaagtgcttgattgtctcgctcggtgctagaaagatatagcgcataagcataaacctgctggggatcggccggtttgcgtaccgccaacccggcgaattccctgtcagcctgctgcggctgcccgctttgatacagcgcctgcgccaaacgataagtcagccagacatcgtccggcgccattttctgcgcctgtcggtatttttccgctgcctgatgccactgttgctgcgccgcgagttgctcggcctgctgtttcagcatatccagcttcagcccgttcagcgtgtcgcgcattttcgcctgttgtcccgccggtaaaccgctgaggtaagccatagctctttccggagactgacgctggtagatatttgctagaccgcgcaccgcactgctgttaccgggttccagacgcaacgcctgctggtaaagctgttcagcggttttatcatcatggcgcgctacggcaacgtcggctaaacccagtaccgcgtagctgtcgctgctattaagctggcgcgcctgctgatatttctgctgtgccaaatcagggttacccgctttcagggctttatctccctcatccgcgagtaaccaataatggttggttttaatcaggctggtccatttatcgctgttcagcccagttttatcgactttctgcgcctgttcaaacaaactagcagctttttgccgatctccggctcgcgcataggcgatacctaatgcgcccaaaacgtcggcgtcattgggggcagtagaaagcgcctgtttcagatcaggaatggcattgcggctctcgccactatccactcgggacaatccggccaagcgtgcctgatagctgggatcggacaacattttttcctgccgagccaattcgatacgcgctttatcacccgcggtaccaccggcgaaaacatcgagaaaacgattcaacagagaaatactctgcgggctaacaggcaacgctttgatttgatccatccacaaatcggcagccggtgagttacccgcaggatccgcagccattttttggagtaaagcataggcctgatcatcctgtttttgactaaacagcattctggctaatgccatacgcagcggaatattaccggggaactgttgatccaaacgctgcaactgcttcatcgccgtctgctcttgccccggcaaacgtgccaccagccgccagtattccaccgctaaatccagcgttggcagctcacctttcagtagcaggtcatattggactttcgcttcctgaacgcggccagcggtggccagcaatcgcgcctgctgtaatttctgcatgacttcgggctgcgtaagcgccagcgccatttttgactggcgataaatatcggaattcggggcaagctgttgcaacctatccagctgttttttcgcctcttccgtgttcccttggcgcagtgcctgacgtattcccgccgcagcaacttccgggttatttggatccatcaggctgaggcgatacaaggattggcgcaccagttcatctttatgggtagcttcccccagacgaacctgttccagaagaaattgagcgggagcaacggcctctgcgcctttagcctggggcaataacgccagactaaaaggaaatacgctcagccagtttaatttgaagttacgcattgactgccccaagagggtaaaagctcaccctgccgattaaaacgataacgattctgtgcccatccctgaccataaagcgtcaaaacggaactgtaataagcgtcggagccgggaggtgattcttccacccgctgcgtctgttttttcaatatttgtgagccacttgccgttgcgctggcgcttaacaacggcaatagggcggccgagaaacctacaggcccgttgcccgtcgttttgccactggcggtatcggttttctctggtggaagcccttgctgctgcgtcacttcaaccatcggctgaaaacgttcgattagcgccgctttctgtgggctgtcgtccgctaacataccggcccagagataaactcgaatggcatcgtagctgccgatattgggtttcactttatccggctgccagccgttggttttgcgccacaccacccaatccggcgagaatcctttcggtgctgtttccagccagagtcgctgatttaccgactccattgcctgccacggcccttttttcatactggcaaaccgcgccaataactgtggcggctgatagctgggattgacgcgccaggtatcttcgtcaacaaaacccacttttcccggtaatagcattcggcctaaacccggaatatgcgccacctcttctttggcaatccgctgcaatagcagagtccccattgtggtgtagcggcgactattccacagccgtccggcctccagcagatcgtaggcaatccacagatccgcatcggaagcggaattgctatccagcacgccccaggttttatcctttttctgcccccacgaccaagcgggcaggcgagcggttaaatctcccgccgccagattgttttccgtccaatccaacagcaggttaaaagccgcgcgatcgttagctaccagcgcaaaaaatagcgcatagctttggccttccgaagtggtcagcatttcggggacgctagcatcaataacgcgccccccttggcttatatagtgttgtttgaactgctgccatgcgggccaatgacattctgccgctgttgccccgctataggccaacagcaacaggctgcatatcagtcggttaaacatcacaaccataaaacctagtccctctcatctggagataaacgacggcggctcactgcgcgcagaacccgccacaacatcacggcaatcagcacgacaaccagcaccgcaaccgcagccagcagcactggatgggtggataaggcgtaccagatgcgttcccaccacggcagatggccgacgctgtaggtatcgccaacccgcagactgttaacgccggaatcacgaatcaccgccacggaaccgaacacggccgcacgtttgccagtatccagcaaagcatcattcagcaattcataaccctgcgggctatcagccagtaatgcgacgatgctgcgttgatcgtaataaggagattgaaccccgataatcgccgacatggcgccttcggagctgatggccgttttactatcaggcaccgcatccgttggatcgatagttgccgccgcgacaatcgactggcgattcggcattttcacccagctttgagtcgcatcaaccaacaggttgattttcttatcatcccgcagttctggcggaatagagccaatcatcagaatatcggcatctttgtccttcgcctggctccaatcatcggtaatgctgatgcccaccgcaggataaccgacctgcgcaccgatattccccaccgtattcaacagtgcggtaacctgagcgggctgcggcttaggctgtaccaaaaccaaggtttgggataaatcggccatacggctgaatgggaagcctgcattggcaaatgagcgcagatccggcatttccataaagtggcgataaccggagaaatcgatcgtggagttttcgtcgatcaccacatggttaggcgaggtggtgaaggtttcgcagcgccctccggcattgctggcaataagcgtgctgtaatcgaaatcaaagcgcagttgattggtcatacccaatttcagcgccgggatcgtcaccgctcgcgtgccgtcttgtagaccctgaatcaatggtaaacgcagaattttggcgctttcctgacgattaggcactagcggataatcggtaaagaactgatcattcaggctgacgcttaagcgtgagccgtctttcaggatcggtgccgtataacgatatttcagctgcatatcgataccggcactgcgcagcaagaacagatccggcggcagattcatcgaaagcaagatcggtgacggcatcaacccactactttgtaactgttcaggatattgctgtagctcggcaaaggtcatgggtctttcggtacgcacccagtttggcgcatcgtaaggcacacgcggagccagctgctcaactttgtctacggtcacattttgaccgcggaacagaatgttaccttgagcaatacccgttgccgccgcaatcagatccttgtcatcccgcccgagaaccagcagtagcttcacgtaaggattatccgggtgactgatcatttccaccgttggcgcattcaccgccggataatctttcagaaaatcaggccgtttgtcattggtggcaaaaatcaccccgtgacgatcgggaatctgattgaaaactgcagggaagtgttgaccgcgccactgagcttgctcaccaaaccaggaagccagaattgcggccgctttttgctgagccacatcaggagccgctgcaaaaacaattggcaatgttagcgggcggttatctcgcgcatcgaagaaaggctcagggaaatgagacaaatcattcttcagcggcagtgactgatagcgtaagtccagcgagctattcttaccgatatccagccacagcgtactgtttgccggattttcacagtcattctgataatgcccgataaagaccagccgcagacggttgaagtcggtaatgtaacgaggatcgatggatagctggatgcgattcggtttacccaattgttcgcgggtaatagccgtcacgttcattagctcatcgttcaggtagactttgagctgcgattcgatcggcgttagcgacggcgacggggtaaactccagattcagagttgcctgtgtcaccacttcatcgctacgtacgccaaattccaactgaccgtccggcttaacgccccctagggagaaattgcccggcggcggagccaatttggcaaaaggatgcaccacatccctcaccggcgcggcctgcggtatagcactatccgcaggcgtaacggccaacgaaggatcgactgccgcgggagaggccaacgtcggctgttcggacgccgtaacggttggggtcgtttcggcatgagacagtgtcgttagccccaaagccattgctgtaaaccaggttatttttctaatcatcatatcatcatcaatgttgagccactgtctggtcctgactccgcagagtctgaccctgtcctacgccatgaggaacaaatgacgctacccacgcaagcaaagaggtaaatccaaccagtacattacgaataagcggcggcgcgtaattcgccatacgaacataaccccggaaacccaacgccagaacatcgcgcagactttcgataggtttatcttcagggaaactgtcctgccacagcgcccaggtatcggcgcgggcaaaagtacactggataaagtcgatgtgctgagccacgctcagttcgtcaatacgcatcccgacttttctgccaaatgcccgagtgaccttgcaggggaagatgtattcttgctgaccgcgcttcagtagcaaattgaccgcctcgccgtcctgtaatagcccttcgttacgcatttcaatccctacgccaccgtcggaatagtcacgcaatgtacaggcaaacaggtgaccgtcttttcgctcaaccgccgcgggcatagcaatttccacccggtgcgcctgacgaacctgtttagcttcaaccgccacggccacggcaccacccagaatcgtcatgttgtaaataacccacaccaaactgattatcaccgtcatgatttcgttggtcggcccattccccaaacgccacaacccggcaatcaatcccgccagattgagcagcaccagcgcgatataaggacgggtgataacccaatccacatgttgctcttctatcaaaccgcctttggccgttacgttaaacttccctttatgcggattcagtagcgcgaccgtggttggacgggcgatataccacgccaatacggtttcgtagatttcactccagaacgagtggcgatatttaccctgcaagcgggagttggtcaggctggcgtgaatcatgtgtggcaagacgtacaacgcaatcgccagcgccggagcaaaaatgatgtacgcatgcatcagcaagaaggctagcggtgcggttaggaagatcagccgcggaataccggccaaaaagtgcagcatggcgttggcataacacaaccgctggacaaacttcagccccttgccaaacaacgggttatccagccggaagatctgcaccatgcctcgcgcccaacgaatacgctggccgatatgcgccgagaggttttccgtcgccagccccgccgcctgtggaatacgaatataagccgaagtatagcccttacggtgaagtcgcaatgaggtgtgggcatcttcggtgacggtttcgacggcaatgccgcccacatcatccagcgcgctgcggcgcaaaacggcgcaagaaccgcagaagaaggtcgcgtcccacatgtcattcccgtcctgcaccaaaccgtagaacagcgtgccttcgtttggcgtctgacggaaacgtccaaggttgcgttcaaaaggatccggcgagaagaaatggtgcggcgtctgcaacatacccaactttggatctttgtagaaccagcccagcgttagctgtaggaaagagcgggttggcacatggtcgcagtcgaaaatcgccacaaactcgcctttagcctgcttcaacgcatggttgatattaccggccttggcgtgctcgtgggttgggcgagcgatataattcacgccaacctgatcggcaaaggctttaaattccggtcgattaccatcatccagaatatagatattcaccttatccttcggccaatctatgcctaacgccgcgtaaattgtgggttttacaacacccagatcttcgttgtaagtcggcaccataagatcgatggtcggccaggtcgaaatatcctccggcatcggtaccggctggcgattaagcggccagatagtttggaagtaacccagaatcaacactacccaagcgtaggtttctgccaatagcagcagtaaaccgcagaccaggctcaccgggtcgtcccaatttagcgtttcggtatagcgccaccacagataacggcaggaaacggtaagcgatagcacaatcagcattagggtaggcaaacgccccggaatacgccgaaccaccatcgcgatcgcccatagcagcagaacaaacacaaactgcgccatcaaaccaaaaggttgggaaatacaaatcagcgccagaattccggcaaaaatacccaatgagataaacagaatgcgtcgggtacgctgctgcaaacgaccgacccacgccactaacgcctgctcccagcgactttttttgactttttccggcaatatattcagccaggagcgatagctcagctttttggtgcgaacccagcccggagccatatcgacgggcttcggttttttctcccgcggttgagacgaacgcgtcaacaccagccacaggccttgcagcaaataacgcaccgcatctgccaagcgcggacggcgattagcaatatgcgggaaccagtaacgacgattctgaattacattttgccagctcggagattcaagacgcaaaaatagccaccccagcgccaccgcgaacgtggtcaaaaaagcggtcagaatcgtgcagccctggtccagatagtggttatatcggtgctgtagcctctgatagaccggaggcataaaaagtccccgaattaacaggctcatagatttttttccgcgccgtgaatcagacaccaatttgccagcgtattgatttcttccgcagccagactttgcggcgcatattcacccaacggctgcttcgccgctaacgcttccgcaacggcttcatcacgatgaataaatagcggcaataaattgcgcaaactttgtagccacaattgatgcatatcttgctgtaagtggctggcagaagagaattgattcaataggaaatgacagccaaccggcagcgcctgttggtgcaaacgagcatgaatcgcagcatcggcggcgatcagcaacagcacgtgatccgccaacgccagcgcttgctgagtgagcgggctatctcctgcgggaacatccagcaaaatccagcggtgatcgccagctgcctctaggtcagccagcttttcctgccagtcgaacgaagctaaagaaccggacaaatggcgctgctcattcatattgagctggccaaaaggcaggaaatccagcaaaggcatataacgcatggcttgctgctgccagcgattaccatccattgccgcccgcgcccagccgttcgcctgttcgtaaggcatattaaaatggagacgtaataaattatcagacgagaaatcaatgaccagcaccgattcctcaagctgttgtaatgcccaagcgagtgcagccgtaatggatgtcgcaccaacaccgcctcttagcccttgcaccgcaatcactggcataagctatttgctccccgagttttgcgccaattcggctaataatggccagcgcgccatcatttgcgccatacgttcctgacggacaatatcgatataacttaatttgggtaatgcgaatgctcggcttaatgctagtagatcgtcctgaacctcgggagatgaattcacataaaaccgattgattgaagtattcattctgctgcccttgaaaaataggctagtgtaataaagtattttgattattagagtatactttgcctaataagataagtcttaatttaatatcctagtacagagttggttaatgtgagatgcgatgatacaattaaagcatagcatttctttttacattgacctgtagaacttcaacaaaattagaagcataaaaatctatgttgagaacattctcgttaggtattgataaaatttgggatgaattagccgttgtgcaggcttcaggtctctattggatcaatatagaccgcgaaagtgacgctaatctattctgccaacagataattagagaccagcccaaagatacccgctcggcattgatttgttctggccaaaaaccctcgaatttactagaaaatattgtcggctacgggccggaaaaactccctttatttactctgccggaaaaaaaagccgccgttaaaaatctcgtcaatgatttgatgcgctcattaagaccacagcgacgtttttttattttattggcccatgccagcttatggcaaacatttacaacggaagaaattcagcgctgggtaaaggaattaaataactggctggaaaaatatcaggccacattagtgattctgagtcatggcagcggcgtcagtaaacttaaaacgcaattagttaaccaacatcgagcattgcaaggacttgccagcctgcaatggcagcacgatcacgcccaatatatggtttcctggtggagcaccctcagcggcgttaccgcaaaccaattggtaaaattgcagccaagcccggaaggctggcagatggcggaagagaaagaacagcagccattggcgcaatctcgtaacgacgagtatatctatttggctgaagccagcgtgctggaaggcgctccgccgctatctaccagctggcaactgtttgaaaacaatcttttattgtctgagaaagcctttaatgctcacgcagcaacgctgattttttcgcttcaccaaagcgatcaaatagatgaactggcgcaccagatacacagcctgcgccgccaccgcggcaatgcgttaaaaatagtggtgcgggaaatggattccagtctgcgttatagcgatgagcgcctgttactcgcctgtggcgtcaatctgattgtgccacatgtcgctccgctatcccgctttctaaccatgatcgaaggtattcagggccagcgtttttctcgtcatatacctgaagatattaataatttactggcttctctgcgcccattgcagctaaagggctatctctcaccggagcaattctgccagtcggtgctagccttgatgagtaacaccctattgccagaagacggcaaaggcgtgctagtagcattacgcccggttcccggtttatcggcgcgtcaggcgctgactctgtgccatatgcgtcgctttggcgacatcgtcacgttggctggcgatcggctggtcgtattcttatccacgtgcagaatcaatgatctggatactgccctgaactttattttccaccttccggtgaatgaaaccttcactaatcagctggtgtggcatcaggatcaggaaatcatctctgaaatcaataagatgaacaatccggactatttacaaaatgtcggagaaaataaaatccataaactgaacaaaactcagcagaaattaacgccgtcagcgcgcagaacccccgtagctttgacgctgaatctgggtagccgcaaggagaacgtttaatgaatctcagcgatatttttcaggttatcttactggcagccatcgtctttttccctttgggttattttgctcgcggccgcctgcccgcatggtgggcgaagaaacaacacttttttctctcagcacgctatctgaaatcagaagggatctggttgcgtgacggctcttccttacatattaagaaataaccatgaacctgaaaaaaaatgcgcaagaatcgcaggcgccatggcgttattggcgcggcctgggcggctggaactactattttctgctaaaatttgccctactctggtttggctaccttaactttcatccattagccaacctggtattcgtcgcttatctggttttccctattccttctgagcggctacatcgtttgcgccattgggtcggtattcctatcggtctggggcttttctactacgatacttggctgccgggcatcaatagtattttcagccatggctcgcaggttgccgggtttagtttcaactatttcatagagttagttgaacgcttcatcaactggcgcatgatcggcgcagccttcgtgatgctggttggttatctgttcatttcccagtggattcgcgtcaccgtgtttatcgtagcggcaatgatcgggctaaacgtgttgaccatcgctggccctgcgttttcgctgctgccgactaccacaacagccgctgataccacggcgtcctcgagtcagaccaatgggtcgggcgccacgaccagtgcgcaacccgcggctgatgcgccgccaaccagcgcaaacctgacggcgtacttaaacagtttctacgaacaggaaaaaggtcgcatcactcaattcccgactacgctgccagctgatgctcaaccatttgatttactggtaattaatatctgttccctatcttggtcagatatagaagccattcagttggaaaagcatccgctgtggagcaagttcgatttagtgttccagaacttcaactcggccaccgcctatagcggcccggcatccattcgcttgttgcgcgccagttgcggccaagaatcccatcacgacctgtatcaacccgccgagcagcagtgctatctgtttgataatttagccaaactgggcttcagctctcaattagttatggatcactccggcgcattcggcaactatctgcaaaatctgagagaagatgccaatatgcgcgcgccgctgatgtctcagactggtattagcaaccaattgatttccttcgacaatgaaccggtttacaacggtttagagctactgaaccgctggctggagcagcaaaagaaccaggcaggagatgcgcgtagcgcgactttcgtcaatattgtgccgctacacgatggcaaccgttttacgggaacaagtaaaaccgccgattacaaagccagagcgcaaaccttgttcgatcaactagatagcttcctgaatgagttagaaaaatctggccgcaaggtaatggtcgtggtggttcctgagcacggcgcagcgctgatcggagataaaatgcagatgtccggcctgcgtgatatcccaagcccgagcattactcacattcctgttggcgtgaagctgatcggtatgaaagcaccacagccaactagcccgctggaaatcaaagcgccaagcagctatctggcaatttcagagctggtttctcgcgtcgtggacggcaaaatatttaccgcaccgagtgtagattggcagacactggttaaaggattaccggaaaccgccatcgtttcagagaatgataatgcgattgttatgcaatatcagggtaaaagttacattcgtctgaacggtggagattgggtgccgtacccgcaataaatctgatgcggtatacaacctaaaaggggcgtaataatacgtcccttttttatttcgtctggacgaataatctatattccctgattagcattacgctaacaaagataaatttacccatttattaatcaatgtcagactattgaagtgaataaatatcctaatcaagtgaatatgccagatgtgaataaatttataatttatatcctcaattccttgatgtttattgacgacagacaataaaactcatttgcttatagagttattcatcttttatcaattctttatttgtttttgttataaaaaaacgccggcagcaacatcaccggcgttgttattaacttcctcagtccatattaaccggccgcttcggcttcatcctgctcgatagcaaaacacgccaccatttgatcgccatactgtttaagctgcggctgtaattggctacaggtgccaaaggcccgacggcagcgagcattaaacgcacagcccggaggcggattcatcgggctgggtagctcgccagttagcttgatacgttcccggcgcatatccggattcagccgtggcgtagccgatagcagcgcctgcgtatagggatgacgcggattattaaagatggcctctttgctgcctttttccacgcagcgaccgagatacatcaccatcacttcatccgcaatatgttcaactaccgacaggtcatgggagataaagacataagacagccccatttcctgctgtaaatccatcatcaggttcaatacctgcgcccgcaccgacacatccagagcagacaccggctcatcggcaataaccacatccggattcaacatcaaccctctggcaatcgcaatacgctggcgctggccaccggaaaacatatgaggatagcgatcgtaatgctcagttttcaggccaactttcgccatcattgccaacgttttctcacggcgttccttactgctcaacgtcgtgttgatttgcaaaggctcttcgagaatctgccccacttttttacgcggattaagcgagccataagggttttggaaaacgatctgaatcttctggcgccgtagtttctctgcgctttcatccggcttcagcaaatcctgcccttggtaatacagctcaccgccggtaggtatttcgatcatggtcagcaaacggcctagcgtcgatttaccacagccagattcaccaactaccgccaacgttttgccgcgttccaaagtgaaggagacaccgtccagcgcttttaccaagcgttccggagcaaaaaagcctttcttcactggatagtattttttcaggtcaatcgcctgcaagagcggcttggccgcctgggattcaggcttcatttcagtttcattgtggttcatagggtcggcctccccgcatcatccaacggtgtatggcatttaacctgacgtcccggcgggccgagcagttccggttcttcgctgcgacagcgttcgttggcatatgggcaacgaggattgagcaaacagccgtcgggacggtcatatttacccggcaccacgcccggcaatgatgctaaccgtgctttatcctgcgcaaattccggcaatgcacgcagcaatgcctgagtgtaaggatggcgcggcgcacggaagatttccgaggctttaccggtttccactacctgcccggcatacatcacaataatatagtgcgccgcctcggctaccagtgccagatcgtgagtgatcagcaacagagccatattttcctgctgctgcaactccagcaatagttcgatgatctgcgcctgaatagtcacatccagcgcggtagttggctcatcggcaatcagcagtttagggcgacaggcaatcgccatggcgatcatcacccgctggctcatcccgccggaaagctgatgaggataaacatccagacgtgaagccggatcgggaatacccaccagcgtgagtaaatctactgctcgctgatgccgagtacgacgattgccgccctgatgcaccttcagcgcttccataatctggtagcccacggtgtaacacggattcaggctggtcatcgggtcttggaaaatcatcgccacttctgagccaaccagttggcggcgttcgttttccgaaattttcgtcagatcgcgaccgttaaactccagtttgtcggccatgactttgccggggtagtcaatcaaccccataatcgccagagaactgaccgacttaccggaaccggactcacccacgatacccacaacctgaccttgctcaatgctatagctgatacggtctacggctttaaacggcgctttttcatcaccaaaatgcaccgacaatttatctacttttaaaagtgccatctctctctacctctactgcttgagtttggggtcgagagcatcacgcaggccgtcccccatcaggttaaacgccagaaccgtcagcagaattgccacgccggggaaggtcaccacccaccaggcactctgcgcgaactgcaacacgtcggagagcatggtgccccactccggcgttggtggttgcgcgcccatgcccagaaagccgagtgctgccatatccagaatggcgttagagaaaccgagagaggcttgtacgatcaaaggtgccaggcaatttggcaagatattgataaacatctgacgcagtgcgccagcgccggcaacgcgggaggcggtcacatagtcgcgattgacctccaccagcaccgccgcgcgagtcagacgcacatagtgcggcagtgccacaaaagtcagcgccagagaggcattcacgattgacggcccaaataccgccaccagcaccaaagccagcaacaggctcggcagtgccagcatgatatcgacgagacgcatgataatggcgtcaactacgccgccaaaatagcccgccaataaacctaaaatcacgcccatcaccagcgatagcgtaacgaccaggcagccaaccaacagggataaacgtgcgccatacatcaggcgggatagcacatcacgccctacgtcatcggtgccaagaatgaatttccaactgcccccttcctgccacaccggcggtttcagcaaagcatcgcgaaactgttctgccggcagatgcggcgccaaccagccagcgccaatcgcgaccaccagcatgataatgatatagaacaggccggcaacggcccctttgttgcgcttgaaatagtgccaaaactcctgcatcggggtcattggcttcggcgcactttttactgctgactcggtaagttgagacattctgcgccccttatttcttatggcgaatacgcgggttaaccacgccgtagagcacatctaccagcaggttaacaacaataatcatggtcgcgaccagcaatacaccgccctgcaccactggataatcgcggcgttgcaatgcatctatcagccaacgccccagccccggccaggagaaaatggtttcggtcagaatcgctccagccagcagagtgccaacctgtaagccaatgacggtgacaaccggcagcaaagcgttacgcagggcatgtaccacaatcacgcgcatccggctcaatcccttggcgcgcgcggtacgaatgtaatcttcccccagcacctccaacatggatgagcgggtcattcgcacaataaccgccaacggaatagtgcccagcacgatggcaggcaggatcatatgcatcacggcgtctttgaaatcgccttcttcaccccaaatcagggtatctatcagcataaaaccggtgagaggatgactgtcgtcgaggaaaatagtatcgctgactcgcccggataccggcgtcagattgagctgcaccgaaaccagcataatcagcatgatgccccaccagaaaatcggcatcgaataacccgtcagggaaatacccacggcggtatgatcgaatatcgaaccccgtttgactgcggccaaaacgccaaccggaatcccgacgctgatggcaaatagcatcgcgcacaaccccagttctagcgtagctttaaagcgcggcacgaattcttcccatacggaaatacggcttttaagggaaatccccaaatcgccgtgcaacacgccgttaacgtaatggaagtattgttgatagagaggcttgtccagccccatttctgccatgatttgcgcatgacgttctgcggatataccgcgctccccagccatgatggtcaccggatcgccggggatcatatggacaaaagcaaaggtcagcaatgttatgccgataaacgttgggatcactaatcccaaacgtcggagtatgaactgaaacatatcccgagctctctgtgtaaagtgcccaacagctcataggccgtcaggcttattaaaaacccggccccggagccatccgcacaggctctgctctcagggatgggtttaaggctcacatctaaaacgatgtcttaactatctggaatgccagacaaacgagggcaccttagcgccctcattcatgaaccgcattgacaggttatttatcgatatccacttgctggaagtagtggccacccaatggatcgacgatgtagttttttacttctttacgcacaggttcgtacacggtggagtgagccacaatcagcgccggagcctgatcgtgcataatcacctgagcctgtttgtacagttcggcacgtttagcctgatcggattcagcacgcgcaggttggattacgtcttcaaacggcttgtaacaccatttggagtagttggaaccttgcttggccgcatcacagctaaacagcgtagcgaagaaattgtccggatccccattgtccccagtccagcccatcatcacggtctgatgttcaccttctttggcgcgcttcagatactcgccccactcgtaggtgacgattttggctttcacaccaactttcgcccaatcagactggatcatctcggccatacgacgagcattcgggttatacgggcgctgtaccggcatcgcccacagatcgatagagaaaccgtctggcaaaccagcttctttcagtaactctttcgctttttctgggtcataggcgtaatctttgatttcatcgttgtagccccacattgttggtgggatcaggtttttagccggctgaccagccccctgataaactgctttgatgatcgcgtccttgttcacggccatagtcagcgcctgacgaaccttgacgttatccagcggttttttctcaacgttaaatgacaggtaacccacgttcaggccagcctgctccatcagattaattgatttgtcttctttcatgcgggcaatgtcagccggattcgggtacggcatgacctgacattcgtttttctgcattttggcgtaacgcacagaggcatctggcgtaatagagaagactaaacgatcgatttttggtttggtgccccaataaccgtcgaaggctttatacaaaatgcgtgagtctttttgatactgctgtagctggaacgggccagtaccgattggattcagatcgactttctccggcgtaccggctttcatcatgttatccgcgtattcggcagacaggattgaagcgaagtccatccccagatcggccaggaaaggcgattccggacgagtcagcacgaagcgaacggtatgatcgtcaactttctcaatgttgctgattaactcacccatccccatcccctggaagtactcatagctgccgccagagactttatggtaaggatggttggcgtctttctgacgcatgaaggtgtagatcacgtcatccgcgttgaaagtgcgggtaggtttaaaatctttgctgccctgccacttcacgtctttacgcagatggaaagtgtaggttttgccgtcttcgctgacttcccatttctcagccagcgctggctgaatttctgttgtaccaatcttgaactcaactaaacggttataaatggcacgagagctggcatcgtaagtagtgccagaggtgaacaactgcgggttaaagccttccggcgagccttctgagcaatacaccagtgtttttgcctgaatcccggcagaaacagccagcgcaaccagcccaataccgaattttactatccctgcctttcccaaggaaatcgtcatcgcttgtgctccattgtggtgatgtgtgttgtgtgtacagccagaccctataattttttagtccgcggtctgtgctgttctggcctgatggccgcaggaatggtggaatgcgatgccgaatagaaacctattcaggcggtcggtttgaagaggttaaaaccccaaaacttctgtcgctaactacccctgagggtaccaatttggcaacagttaacagcaacgtcaatatggctgatggggttttatacagagtatgagaaacagcaagcaaacataaaaaaaactttttattaacataattagcattaaaaattatgctactactaattagtcagtgttatccactgggtaaaattcatactccagtggtaatacccagagataatcagaaaaactttgttgctaaatgatgaaaatctgctcaattatttttgtgatctcacagcaaaacaggatgaaatgctgccttatacccataaataggtgacgactagactcatttcatacatggttcattcatctttaccgactggttcgcgaaaggaataaggtcaggtcaatcaaaagcagatttgagatcgttgggcgtctagccttcgcgcaccaaagcaaagcaccaaaatagtgcgtccgggcaaaccgctttaatcacttcgcattggccgcataaaaatatgtctttgcgccgccataaatcacccggcgcttcaggaaaattaaaatagtcctccatcaagatctgaacgttttcttcacccctaagccgccttggatcagacccgaatcactggtcagcctttcgacgtcctcaaaacgacaaccattacataaaaaccctgacctgttagcgataactacataacacgcgctcttttccccgcgatgcccagctcgccgtctctctaactccttttcattaataataatcttggcttgatcgcccgttaaataagggtttccaatgggagaggtagccagaatattgttaatatattatctgatcatgctttttacgatccttcacttcagatttagtcaatttattgtatgaaacgccatctttactcggagtctgaatatttattatcgtacttaatcctccctgaaaatatctatcctgacatttacatttttttcttttctcgctgatattaatccagctatttggctctcagccgcttttttatcgaccacgatttcagctcaaacatttgacaagaataaaagaaagaatattggtgtataaatatctatggcgttgaatggcatgttgaaataagcattgaaacattgagcgcgctcgttcgccctccttaactatcaacaaagtcaagtgacaacagaggtccggcgtctggcaggtgagagtcaacggttgatggaatgcgggtctataactgaactcttggtttgctggtataaaaggtttactcgctgagcctgagagctaagagctaagagctaagagctaagagctaagagctaagagctaagagctaagagctaagagctaagagctaaacaatgttcacgggttcttgtgtaaatgctaatgtatagttaaacatcgcaagcaaagtgagccactctatttcttgctggtagctgatattgccgtccaattgccaatcacccaaccggcggccaagattacaaccccaaactccatcggctcaaacgtcgtctctgtattacgatccccgtatcattgagaaaaaaatgacataacactttgtatgagaaccgagtaaaaccttttctctattattatcctcaaattgcctatcaagtatatattcatccaataacattagatgattccaaatttataattacggattaacatcaaatataatatccaagataaataaaaatcctatcgagataaatttatgccatcgagtattaaatatttttatttatagtaataatactatatctcagtcctgacaatgggatgtatatcattaaaatcaatgataataaatagaggtttttatttatactgaaaatattcacaccgtaaaaaaacctttcatataatatttattaatgcctgatgcattaccaataaaaattaaaacttatccgatagattgattggttaccttccactgaagtcagcgagttaatagccaaaagatcccgcgggaacagacagaagatttattgtaggaaaaggttggagtcttggagtcttggagtcttggaatcttggagtcttggagtcttggagtcttggagtcttggagtcttggagtcttggaatcttggaatcttgagaatattgaggtctataaacgaaaaaaccccggccaaaaagccagggttcttaaatgtggtcggcgagagaggattcgaacctccgacccactggtcccaaaccagttgcgctaccaagctgcgctactcgccgaatcggggcgcatcttactgctacgctcctggggcgtcaatcactttttaacaaccctgcgccgagtgttgataaaatcaccggcgctgactaaaaagtgacttacctcccccttttctacctctttgatcaggcgttggcttcaacctgacgcggtgactgcgcgcgtaggaatggcaacaggaacaacgcggacatacaggcagcaatagagataaccacgaagaagccgttccagtgccacacttccatgatgcgtgcaatcgggtagccagataatgcggcccccagataggcaaacagaccaacaaacccggtagccgcaccggcagcgtctttatgggagcattctgccgccgccataccgattagcatctgtggcccgaaaatgaagaaaccaatcgcgaagaagcaacctgcctgaagtacatagctgatgcccggcataatccacagggacgccacggacaggaagataccgatagagaaaatcaggttcattggcccacggttaccgcggaaccatttatcagaaccccaaccggcgaccagagaaccgataaaaccgccgacttcaaacaatgaaattgccgagtttgcggtcatcagggaataacctttttcctgagtcagatacaggttaccccagtcattaatcgcggtacgcacgatataaaccagcacataagataccgccagcagccagatgtatttgttcgtcaatacatagcgtttcacgatttctttgttggtcagacccagaccttcagattcctgtaccagttccatggcgtcattacgccatttaccaacgctcggcagccccatggtgcttggcttatcacgcagacgccagcacatcagcaaaccaatcacgacgccaataatgccaggaatgatcatgccgtaacgccaactgaaatgcagagaaataccgcccaccagcagtgggattaaagcaccaccaaagttatgagaagtattccagatcgcccaccagccgccgcgctcagagcgggagtaccagctagtcagaattttggaacacggcggccagccccagccctgaaagaaggcgtttaaaatccatagcgcgccaaatagcagcagggaagaactcataccaaatagaatattaattatccccgtcataatcaggccgatacccataaagtagcgcgggttggaacggtcactgatcatgccggaaataaatttggaacagccgtaggtgatataaaatagcgtgcctaaaatgccgacgtcagacatggtcaggcctaaatcgctgagcattgctggcatgatgaagttgaaacttttgcgggtgaagtaaaaggcggcatagccaatgtacatcgtccacatcaactgaatacgccaatatttgtaggtcgcatcaatttctttttgatccgttaccggcggcacgttatcgcggcttttaaagaaagaccacatgttgaacctcagacattaataaaagtgtggtcatcatggcgcgcgcgcgtaggaaagaaacggggtacattcccaccggcaccgagagtatttcctagttttgcttagttagcgaaggaactgtgggcaggatcacactcaaacaggtaccgttatccacctgaaatttgaagtgcccgcccagcgcgctaacccgctcctgcatcccacgtaaaccgtagccaggcgtgaacttctccagattcaccccttttccgttatcgcgaatagtcagatgcacctgctgcttaacctgccgggcatcgacctcgatgcgactggcttcgccgtggcgataagcgttcgtcacgccttcctgacagatgcgatacaaggtgattttcagggtttcatccaattgcccatcgctcagttgccattgcaatacgccaaccacagattcatcctgcggaataagttcgcgcatcagcgccgccaccgccgcagaaagcggtaaattgttcagcgctgctggccacagctgcttcagaacatcatgaacgccgtcataaacccgcagcgccagagtctcaatcacgtcagaacaactcactaccggtgcctgatccgtcaagcgccggatgatggtcgcctgagtgcgaatgaccgtaatactttgccctacttcatcgtgcagctcgcgcgcgacttcccgccgggttctttcttcggcaatcactaagtctctggctaatcggcgattttcactcagacgcgcagaaagttgctgattcagttcccgctgacgttgaatgcccgcccccaacaataagccagtcagactttgtgccaacagagaaagcaataaatcccgatgagaatcaagctgggcgggttcattaaccatcagcgcgacaccgtttagcaaggtcgccactaatgccccctgccagccatagcgataggacataaacacaatggggatagccagacaaaatggtgcaaaacgccttaattccgcttcgctaacctgatgttgcagccagatactcagagcaaacagcagcaaataccacaccagatggcgcaaacgcaggttaataggcttgtgaatcagccccggctccagcggcagccagatttgtcgcgccagatagtgccacagcaacaggcaggtgggcgctatggtaaatcctcccgccagccccaaaagtagcgccatcgcgccctgcgcggtggaaagctgccatatcaatgcctgaatcaatgcggcgatagcaaccaccgaaccttgcatcaacggccactgccactcgctatcgctctgctggtgccgcaatagccaaggggaggcaaacactgccagcaacgtggtaaacagcaatacgggtaaggcagtccacagtaatatcaggctatcgaattgatctgccagcaaccataacagcaaagtgtcggccaataagattcccggccagtaaccgcgcgggctttgcagtaaaatgcctaaacgcagcccgaaggggaagagcaataatgcctgtaatggctgttcgaccagcagcgtcccaatgctccacagacaaaatgcagcggtgaaatagataaaaaacaacgctaacagcgtaatcaggcgctgcatcataaattcaaaactcgcttcgctaattcaacgttattactgacacctaatttggcgaacagattagcccgatgcacatgtacggttttaggggataaacccaaagattcggcaatttccctcacttccatcccctgagccagtaaaatagccacttctcgttcacggcgtgtcagcggatcgaccgcgacttgcaccagccgctgggcaatttccggcatcagataaacgccaccgccgcccacggtgcgtaccgccgtaatcaggtcatccggcttgcagcgcttggacaaaaagcccttggcaccgcgttctagcgccatttcaactagcgccggactgtcgtgcatcgacagcatgatcacgccgataccggagggaatgtctttcaacaaatccaaaccgctttgatctggcatggaaatatcacaaatacaaatatgcggattcagccccggcaaacctgcgcgcgcctgctctgccgaactaaattccccaaccacctggatgtcgtcctccatggataacagctgcacaaagcccgatcgcacaatgtcatgatcgtcaataaacgccacgcgataagtcatggaggtctccagttactggggggaaatatggcgaggagtatacaacaagcgatgctcaactgcggaaggaaacaggattaacgccggatagcataactagccggcgtggatgattaattagcgcgacgaattttcttctctggcgcatgacaccagttatttttctgcgcaattcccccgtctggcgaggtataacccagacaacccaatatggaatcaaacagctcttcatgacgatgttgggttcccaggcgttgttgggcctgtaaattctcaaacgcattttggtgctgcggttccgccaggaatttatcggaagcccacaccaacagaggaacacggaattgctctacaggagccatttcacgaggagtaccgtggaaatgagcgttggcggcaatggattcgccatgatcggcggcgtaaaataccaacgcttttttatctcttacctgatcgataacgttagcaatgaaagtatccgtatataacacgctattatcaaaggcattgaccaattgctgacgagtacaggaatcgtctacgcccatacattccggcgtgtagcgagcgtaactgcggggataacgttgagaatataaataatgagaacctttggtatgtaataccaccagatgctttccatccggatagcggcccagtgactctttcagttcatctactaacaacatgtcatccaccggtttgccgtcgttgcgtttctcagaggcaatgatttcacggaatgagtaattatccgcattggcattattgtagaaccacacttcgctttgcatcgcgaacagttcagagctgaagcccagtgatttcagcacggagaaaatattctgttccttcaaagtacgctgcgggttatctgccgccccgccttcccgaacaaacatgcagcgcagagaaagttttgtcgaggtatcgcaagacgtccccttgaaagccaccaaattcttttctttactcaggcgcggcgtggtatcacgcggatagcccaaaattcccatatgatcccagcgggtcgtttcgccaataataaagacgacataggtttgatcgatatctgcgggggcaacataggtaaattctttggtgggatcgagtaacgtagctgcatcgtggctttcgtcatattgggtgtaagcatataaacccaaggcagccagccagttagacggtaagtaagagtgagccaccacgccgccataactcggtaaatctaccgtctttagctgttcatccagtttttgcgccttatccagatagcgtaaaggcaaccaaaccaaagccaccacggcgaccagtaataacaatggcttaatacgctgacccggcgtgcgacactgctctagcaacgttaatcgcaaagcgttcttccaaatcagcagcaacggtaagacgctgaccaacgccatccatagaacgaaatgcagaccaatgacttctttcgagaggtcgatatccgtcgtcatcaccgacaccacgatgccgtaaccaatcactacgttgaagaacgtcatgtaatagctggcagcaacggaaatcagcactaacaggctggcagtaatgcggtaaaacaaacggccacccagcgaaatcaggcgcatcacaaagaaggtaaacagaataatagccaccacctcagtgacggcggaaagcacctttatgccttgaataccctgggaaaatgagtcgaatctacggtaaaagaccgaaatattcaggaaaataccaatatagatagccaacaacaaagacatgttttgctgcgataaagacttaactctgtccataaaaaatgggatcccgggggcaaactatttacaacttgaatgtatcagacagtaatcatcactgctggttccgtttacaggtgataagcacgctattgatttcaccagcaataaatatcttatggattatcacgcgagcagacatgcgccggaacaaagttatggcgagaaaatcaggaaaaaaacagaggaatggcgagagaaaggtaaataaaagaggggaatagataaatcatccataaaggacatttcgccctttatggatgcataaaatccagacgagcctattacttcaggttcagcgtcacgtcgatattgccgcgagtggcattagagtaagggcacacaatgtgggcttttttcaccaactcttccgctacgctgcgctcaacgcccggcaggctgatatccagctggacttcaatgccgaaaccagtaggaatagcgccaataccgacggttccttcgatttgcgcatcatcaggaattttcactttatcctgagcggcgacaaacttcagcgcgccaaggaagcaagcagaatagccagcagcaaacagttgctctgggttggtgactgcgccgccagcgccgcccatttcctttggcacacccagtttaacatccagtacgccgtcagaagaggtcgcacggccgtcacggccaccggtagctttggctttcgcacgataaacaactttctcaatagacataatattttcctttttaggtaatcattggcctagtttatgtttcaagaaataacatttaaataagttactattaaatcgcacactatttaaatggttttacaataataagtgtagaacagattggagccatgtcattgtggctctcatctatggaaatcagatttcctgcaacaacttctctcgcaatgattcaagctgttgttttatatctactaatttatcaaaatcacagtctgcagcgcacatcaccgcttctggaataccctgagcctgctcgcgcaacgcacgaccttgctcggtcaaacggatgatcacctgccgctcatcattggatgcgcgggtgcggatcagcagttctgcgttttccatacgttttaacaatggcgtgagagtcgcggaatccaaaaacagccgttgtccaatatccgataccgtcacttcatccctttcccacagcaccagcatcaccaaatattgcggataggtcagacccagcttccccaacagcttacgataaactttatgcaacgccagattggcggaatacagtgcaaagcacatttgctggtcaagcagtaacggattcttcaacgtcaggcgtccaattcaaaaactatggattcaatatatatagtgtgcgatgtaatcgcaagcaatttcagctcaaataaaaagcccccagtaaatggaggctttctgcgcttactttacttagttacttagctggcgcgtctattttggcatcaatgcgttgcagcatatacggatagaacggatttgatgaaatacgcatcagagaatctaatcccactaccagcaccgctcgctccccgcgcgcagcaaaggtgcccaagctgataccgtactgatcccgaggttccggatagcggccatacagcgaatcgctcattgggaaaggcaaagccacgtgagacagcgagaaaatgtccggtggataaatcaatccggtcggtactgacgtttccgtggtttcaccggccagagtggttatggccaaagtgtcgttactttccggtgacacattggtaattaccgtggtgttgtagttacgcggcggcggcggcaacaaacgagccaacgcggtataagacgacgtgcgtaataacgggccaaagctagcggcgcggtttaaatcaaacagcaccacttcactgccattttttggcaggtgattgtacaacgcggtaaccacagcgcgggtactaacggtggaatccatcagcgactggaaggtcagaatgggcggcagactttccagtttgttatctcgcgcatcgcgggaaatctgctgttgcagcgccgccgtcaacaggtaggattgtcgagccgcatttaccgggaacgaattgtatttaaacgggttaaactccggcactatgcccaaccaggacgcttttgcaaacgcggggaaaatagcgggccagccagcgataccggcaaaacgggcaaaactggtgacgccaatcatcggtgaaatcaggatcactcgctcaggtttcgctaactgcggatcttccagagaatccaacgcatacttcatcgccagcgcgccgccgttggaaaagcccacaacatgcagcggcaactcttttccgctcaatatcttggcttcacgaaccgccaaacgggtagcggccatccaatcctgccaatccacatccgtcaacgccgcaggtacagaaccatgagccggcaaacgaataccgacagccacgtagcctcgttgacgataattttcggcaatatgacgtaggctgtatggcgtatcggttaaaccgtgtaataaaaccaccgcccctttcggcgtgccttccggattcaatatataagaacggttccagtcattggcaaaatgcggggaataaatagggctaccggaatagtaacggtttaacggcacctcaactctgggttccagcttgtccgtcacattagctttaacttcggcaaaaacattgtcttccgctttcagataatccgcccagttggctttatctatttctcccgcccgcatttcatggggaacaaaggtatgccaaagctcaagtttagggcctctttgcgtatcgtaaattcgcacggccaatagggtaacggcaatcaccaccactaccagtacaattcgtttaatccaccgcgtaatagctctggtaggcatgcgtcgctactcccgacctgtattaggaatcaatataacattgagtttatcaccattcggcaatcccagtatcttaaccggatttcattcggctagaatagaagttaacgttgaataaataagcaattggttaattaaacgactaaaacaacctgcgctattttccactaaggtaaataaagaccctagttaaaattgaatctcacaaattcactatatggataaaacatatgaatagccctcaaactgagccaacgaccaaatcaggtagcggctcgcgtcgtgattatcttcgcttccatcacactcacgagcatctgtccggcccctttggcaacggctggtttgcgctaaaagcagaggctttcgcccgattttttggcactccgctttttctgggagcacaaacgctgattgttgttctgtggatcggtgccaacgttatgggtttcgccaaatttgatatctatccctttatcttgctgaatctggcgttcagcttacaggccgcctacgctgcgccgctgatcctgttggctcaaactcgtcaggctgaacgtgataaagccaatgccgaagctgacgcacagcaccgggaggcgctggctatcgccaatgaggaacgacagaaaatggccgcgaccatggccgaacaaatgctggaattattgcgccaaaataccgaattgacgaagttaacacatcagctggcagcgaaaattaatgcgtcaacggcggggaaatcaaaagagagttaaaacgaaagtgaagtagtgaagtagtgaagtagtgaagtagtgaagtagtgaagtagtgaagtagtgaagtaaaacaggctgcatcaagcagcccgttcattcctttcctcaacgtagtttaagactcgctacgctctgtcaggtcaaccggtgttgccgacgcttttcgcgcccaaatccaccatgccagcgtcattaatataatccagcctaatcctacatacatcgcaatccgagtatccgggaaatagcccaacaccataataataaagcccataaacagaatggccagcattggtgctaccggccagaatggcaccgggaatgccagacgagaggcactttccttactcatggagcggcgcatggctacctgcgaaatcaggatcatcagccatacccacacggtggcaaaagtggcgatagaggcaataatcaggaatacattcttcggaatcagatagttaagaaccacaccgcacagcaaagccactgacatcactaaaatcgtcatccagggcacgccattacgcgtcaggcggctaaaacatttaggtgccaatccttcctgagacataccaaacatcatacgccccgcgccgtaaatatcgctgttgatcgcggatattgcggcagtgatcaccaccaaattaaggatatttgccgcagaactgattcccagactgctgaaaatctcaacaaaagggctcccattctgcccaatgctattccacggataaatcgccatcagcactaataacgtcagaacgtaaaacagcaaaatgcgcaccggcaccgtgttgatggccttcggaagcactttttccggattcttcgcttcgctggcggtaaccccaatgatctcaataccaccaaaggcaaacatcacgacggcaaatgaagctatcacgccactgatgccattcggcataaaaccctgatgcgaccacaaattacttaagccagtgctttcatgcccggcaccaaagccaaacatcataatgcccaaacctgcggcgatcatggcgataattgcggtgactttcagcaatgaaagccaaaattccatttcgccaaatactttaacactgcacaaattcagcgcgccgataaagaagataatgctgagcacccacacccactgcggcgcgtctgggaaccataaccccatatagataccgaacgcggtaacgtcggccagcgccacgatgaccatctcaaaagtataggtccagccggtcagaaagcctgctaacggcccgaggtagcgaccggcataatgaccaaaagaacctgccaccggatcgtgcaccgccatttcacccaacgctcgcatcaccatgaaaacggctgcgccaccaattaagtaagccagtaacaccgccgggccagccagacgaatcgcctcagccgaaccataaaacagcccggtaccaatggccgaacctaacgccataaagcgaatatgccgcgcgctaagaccgcgtttgagcgtggatgaatcatttttcatggtgcattctcgcaatgtttaagccctttcaggcaggggttcagagagggtgataccagtatttggaatcacccataagatctgtttttattattttatgaaaggcttggaagcaatccggcaggcatcaacgcatttaaatggcgctgagacagcagttgactggcggcttcaatgtcgggagcgaagaagcgatctttatcataataggccacctgttctcggagcaaatggcgcgcagattccagcgtatcagacgtttttaagcccttacgtagatccagcccctgacaggccgccagccactcaaccgccagaatcccgcgcacattttcggccatttcccacaggcgcttaccggctctcggtgccatagaaacgtggtcttcctgattcgcagaggtcgggatgctatccacgcttgatggaaaagccagccctttattctcactggtcagcgccgcggcggtcacctgtgcaatcataaagccggagttaacgccgccgttatccaccaggaacggcggtaactgggacatatgtttatccatcattaacgagatacgacgctcagacaaagaacctatctcggccagcgccagcgccaaattatctgccgccatcgccaccggttccgcatggaagttaccgccagatagcacgtcgccctgttcggcaaagaccaatgggttatcagacactgcgttcgattcaatcgccagaacttcggcagcctgacgcatttgggtcagacacgcgcccataacctgcggctgacagcgcagagaatacgggtcctgcactttttcgcagtttctatgggaatcagaaacctggctctttgtgccgagcaagtgacggtaagcatgggcggcgtcaatttgccctctctgaccacgtacctcatgaatgcgagcatcgaacggactacgcgaacccaacgccgcttcaaccgtcagaccgccacataccgtcgcggccgcatacaaatcttccgtttcaaacaagccgcgcagcgcataagcggtagaaacctgagtcccattgagcagcgccagcccttctttcgccgccaacgtcagcggcttaagaccggcttttgccagcgcatcggtggctgacaaccacgccccctgatgacgagccttgccttcacccaacaacagcaaactcatatgcgccagaggtgccaaatcgcctgaagcgccgacggaaccttttaacggaatatgggggtaaacctcggcattaatcatcgcaataagcgcctgaatcacttccagacgaataccggaaaaaccgcgagccagactatttactttcaaaaccataatcaggcgcacgatagcgtcatcattggcttcaccgacgccagccgcgtgagagagtacgattgagcgctgtaagttttccaaatcttccgtcgcaatacgggttgaagctagcaatccaaaaccggtgttaataccataagcggtgcgtttctcggccaaaatggcctgcacgcaatccacacttttctgaattggcccataggattcatcatccaggatgatgcgtaccggctgctgataaatatggcgcagatcggccagcgtcaactgacccggacgcagtgtcagagttttcatgcttttttcccttgagtggcggcaaccatcggcaagttaagcccttgttgttgcgcgcaattgatcgcaatctcgtatcccgcatcggcatgacgcatcacgccggtggccggatcgttatgaagaactctggcaatacgttctgcggcctcatcgcttccgtcgcatacaacgaccatgccggaatgctgtgagaagcccatgcctacgccgccgccgtgatgcagagaaacccaggtcgcgccgctggcggtgttgagtaatgcgttaagcaacggccagtcagaaactgcatcggagccgtcctgcatcgcttcagtttcccggttcgggctggcgaccgagccggaatccagatgatcgcggccaataacgataggggcagacagctcgccactgcgaaccatctcattgaaagccaggcctaattttgcccgctgacctaaaccgacccagcaaatacgcgccggtaatccttgaaaactaatacgttcgcgcgccatatccagccaacgatgcaaatgctcatcatctggaatcagctcttttactttggcatcagttttataaatatcttccgcctctccagagagcgcagcccagcggaatggtccaataccgcgacagaataatggacgaatataggcaggaacaaagccagggaaatcaaaagcattactgacacccatgtctttggccatttggcgtatattgttgccgtaatcgaaagtcgggatacccattttttggaaagccagcatggcttcaacatgctcggccatagaggttttagccgcgttgacgactaaagttggttcgctttgcgcgcgctgacggtactcttcccagccccaacctttcggcaaataaccattaagagggtcatgggcgctagtttggtcagtcaccatatccgggcgaacgccacggcgtaccaattccggcagaatttcggcggcgttaccgcacaaagcaatagaaacggcttcgccagcagcggtatattttttgattcgcgctaacgcatcgtctaaatccgttgcttgctcatccacatagcgcgtttttaaacgaaaatcgatgcggctttgctggcactcgatattcaacgagcaagcgcccgccagagtggccgccagaggctgcgcgccgcccatcccgcctaaaccggcggtgagaacccagcgcccttttaggctaccgttaaaatgttggcggcctgcttccacaaatgtctcataggtgccctgtacgatgccttgactaccgatatagatccaactgcctgcggtcatctgaccgtacattgccagccctttcgcatccagttcgttaaagtgctcccaattggcccaatgtggcaccagattggaattggcgatcagcactcgtggcgcgttgctgtgagttttaaacacaccaacgggcttaccggactgaatcaacagcgtttcgtcatcattaagctgtttcaggctttcaacaattttgtcgtaacattcccagttacgagccgctcggccaattccgccataaaccactaattccttaggattttcagccacctcaggatccaggttgttcattagcatgcgcagtggcgcttcggtaaaccagcttttggcattcagttgcgtaccacgcggggcgcgaatttcactatcacgaaatctgttttcagcagtcacggcaatttccttcaacagggtttctgagtgccaataggcactgctcgctttggatgtttattaacatatactcgtatagacaagtataagcaagctaaggaataacaactgacttttgaagataaatgacggtgtgaaattacaaaaacactttataatcaattagttatatttgtatcaaaattgatatatatcggttcaaaagaatattagacgtgatatcactaacaaaaccagcataaaattggtctatttttgcgcacaaaatcacatatatttcacatttggttcacataaatcactataacatttaacgcaaatgataattattcacgttaaatggccatcccatcgacaagctatttaacataatattattggcagtgaacaaccttcggcggtaattggaatgaccatgatgccatcgattgttgcggatttatgtccaaagaatggcgctggcgaagaccatccgaatcggccttcaaagccttatcttgctggcttttcggccagggctgctgcatattttttctagcaacattggctgtggtattttctctttgcgacaaggttccgagcaatccgagaaaacccggcgttaaagcggcagatttcccctgatagtggttaatctgtggccctttctcactcatgctcaaaatcgcctgagccggaccagctaaaaagtctgatacatactgccacgccagcgcctgccgctcatcgtagctcagccctttcccattctggttcattggctccaatacctgatcctcccactgtttctgaacccagcatccagtacagcgaatagcatgagctaatagaaaatcaccgtcgctttgatacagcttccacaccgccattattcccaaatcctgcgcatgattaccggctcctttttgcagttcgacataacgttgaaacagccgttgcagcggattactcgtcgtttcctcctgttgctggaacaacccttcggtcaaattacggctatcctgcgcagtcttgatactttcttcaaccgcaaaacttaatgcctctcgccaagcctgccatgcgcggagcgacactttggttgaagccgctgccgaccgaggctccggcatcagccaccgctcgatacgctgctgccattgttgctttattttgtgcagatatcccatgttcggtgatcgcgtagtatattgatcgagaatgattaaacgccggtgttcttgtaaccaaggctggctctgcgcttcggaaatatcagataattgcagattcatttgtctggcaaattccatcgacggactactaccctgcctgatacttaacaaacgatcctgccactcctgcgcgctcaatggcggaaaatcctcattaaccacgttaaatagaagctctagccagttttcctgccgaatagatggccattgctggcgaaaagcggtaaacgttgtcagtgcaatatcatcgccaaccgcctgttcaacggtttccagccaatcatttacctgctgtacgcggactaacgtccaaagatcgggaaaatcgtccatagacaaagaatggagccagatgttaactgcaggctttaccgaagcattagatgcactggccagcaaccagcgccattggggatcgctttctactaaccgagccaataattgccgtagctgagttaactcgcttttttccggttgtaatcgccattgcgcacgctgcaaagctaattggatgtaaggtaataaaataggagcggcaacatcagaaactggttttttgacataacgtagccgttcaaaagaatcgacaagataatcgtgctcgaaaaggctttgtttaaccaaaatatactgagccaacgccagtatcatttcacgctgccgtattggtgcttcagtgcggaagcggtcataatagcggcgaaattcctctgtgatatttcccaaatcagcaggagcgctttccaatagcgctttttcaatagttcgatgctgccatttcaatatggggataaaagggagataactcagcggcgaatcttgccagcgctcgttgatctgtaattgagtaaccaacgcatttggatcgagactttttattttaaaagtgattaatgcccagctccgccatccccagagaaccattaatccgaatagcatgactaataatcctattctggcctttttatggcaaaatccccgccatagcgtaataaagatacgcaaagctaaagaccgctgagcccacattcccgccccgtggaggagcgttactttcttaatcataggtcgagcctgtaagcatcaaaaaaactcaatccacgaaataacagagaaaaaaaggagtacaataatagatgctgaccatctcctattaataactcgatttaatatcaacttaattattgattttttcctggaacacatcagtttatggctaatatcaactaatttgagataacaatactcaggcaagcatttttcttcattggcaatagttttatccaggaaaatatcgttgtccttgttatatttcccatgaaatcctagccgcaggcaaagtaaatagaccattcgaagctcattttcatttttatcaattttttctagctggttgaaaaaaacatccccaccggtagtggtctgaaataattgtgtttgcagcaaaatatctttccattgcttagcataagagagcgaggaggataaaataaactcatcaaaccaaaccatgacagccaataatgcccgatcgcattcagaatcactatagccctgcgactccgcggctttcgccgccctttcaaaaacctctgtggttttttcacgaacatactgataattatggttaaaatcaggctgtttttccagaatcaaagcgaaacgaaaaacatctacataacagtcaattaatgtcttcataatgccaccgagcacataatctcattttcctgagttaatagtgcgcttaacaaataaggtataatccactgcctgttaaaatacatgttaatccactccctgcttatccttgatttatcctgctgaaagcagccatagccaaatatctcataacgcaacgggacttatctgatagattcacaaataatattaaaagagtacatcattgctagatattcgacagattaattatcattaaaatacatgtaaaaacattaaggaccgatttaatacttaattatttaacaaactgagccgtagcataaaaaactcattactcattatgaaggtatggcaacgtaactcttacaaaaaaaggttatttaattcattaagcgtgccacttttaattattatatagaacaataatttaatttctttctaaccgctaaacctccaatttatagctgaatcctacttaccggattagacagcgacccgaattgctcctgccagaagaaaacagagaatgtgttttggacgatttttttggatgggtatttgtaactaaaaaatcaccatgaaattctatacacatttgtggcagatttaaggggggcgcggaacatcacagacgtgaagtgacagtatcataatgatatatgatggttttctagactgttttggaggtaacgggagaaattgtggcgatggcgggaatgtaggtgtagcgagcgctacgagaatacgctgggtacatgacgggccaatccatattggttaacagacggtcacggcgaatggtattcaccgcaccaaagcggaatcgagctgggtcatatttcttatccttcagtgaattacctaacaagctcaaggcgcagtaatgcgcgtatcgtctagaattactgcagtaatatgtgtatgaaatttgattgaatgccaaaaaaacgtcttttcattgaggagattagcctaggcagttgtataagtggcttcacttctctcatgattcagtgaaccaacttgtttcctacctcaatatagtgattgatttgcttagccaacatcccccaaggaacgaaacatgttacgaggttctgaaaaaaagaagcgctgaaaagtttagatcgcgtacgccagtactacgaatcacaagttgaagccacccaaacagaggttaacaatctcaatctgctacgtcagaaatgcagcaagaccttaatggctcatattaaaatctgtgttaacgatctgacaaatatgccaaaaacattccacaagtcatggaatgaattcaaataggcaatctctatattcgacaatactgaggaaaaaatcgaaaccgaatatcgtaacacccatattgaaccagaaagagttagatattaatatttgaactcatcatgcaccagccttcaaagactctattctattaattagtaattcaatatcatcatagatgaatttagaatagaatatccttctgggataattcttcaattctgcatgagccacgttctcaactggagatgatatttgccacaagatattaccctcaccagactcatccctgaaagaaaaaacagtgaaatcatcaagaaaagtaccaaaacttacagagtagcttctcgctaaatcacttaaatcgttcttttcatcgtcataaaaatcatcatcggatatacacaacgcttcatttaacttacaaaatatcgcctcttgagattcaccccccaaaataggttgtaacctttcctttttcattatatccataagaccgccaaccaagtaaccatcaagatatattaactctgacaatgcgcctaaactattaccctcaaaccataatctggcataccccataaataattttgaatcagaaatgtcatattcaattccaacagtcgattttgttcctatcatattaggcatactcaacatcccttcatatttcttgcgtacttaggtacgtttttcttatctatggcacgagggtttccgcgtatatctacaccatcggttgaaccattccaatggaaggcacctgaaccatcagcagcactactttggaacctatgccaattagctttcttcccctcacctacttttgtccaacttgttttaggatcattaggatctagctggctttgtctaaacagctcctcatgattcgaaggcaatacacttttcgatgaattttgcccagaataaacgggacggctacagcgatggtcagccggtggatattccgcatgggcgatgggtggatttgcggttggagatgccagtgggtgaaatcgagggttcagaataggctcatatgatacgtaaagggcaacttcagcaccctgccggagagcatctatcaccggcagaacaattttatttgttggccgcctaaaaaacaggcaacacaatttttgccgacacagcaatgttaatgcgacacaaccttttcattgtcagttaatgtgagctcaaatttgcgctgattgcgagcccgaccgttttcgattgcaagccgttacacctaagcatgattcttggcttcttatcccacccccaaaactcgctagtcgccattgaataaaccaatatattttagcccattatactgatctttaattggtcgttttatcactaagttgggatcttgataccaaaatattgcattagcttttttaatacccaaattatcacattcactttttactaatgataattcatcctgatcaacagcagcatcgagtagtatctcatctaaagacacttcttgcttatgtctaggtatcatgccaatgaagtcatcatcataccattggatgccgatgtctttgcaaaacgcacactgcctataattagggttattaaagtctccctcaacagaataatccaactcaaagtattccatgtattcctcttctgaggagaaattagttccaatccaaacgtgtactttattttccatatttaacacctgcttagtttcatgtgacctttatgatgtctagctattatcttcttagcatcagctttagacgttgcaccttctaaatcagcaattaacttattatggaaatgtctaccagaccggctaccatggtgccctccatccggcacaggaagtcctttagaatcagttacattagtgaatgtgattctatccgtgtttacagcgtatttttttaactcctcagcgctaaaacctaactctttggctttagctgctaacgaaacagggaataattcatgttttccgccgcttccccttaaggccgatgatactgacgctttattgtctataacatcttgaactgaatcagcattaaaccattcgttaaacttaccgaatccccaaggagtcaaccccgcggatccgttcaagttaacagagcattcacatacttataaattcatttcgtccgcgaacaagataatgattcgggcgaagcagagggaatagaagaccgctgttcgagatgcgaactaatgtcaatatcaccatgatttcatatcatttatagagctaacttctaaaaattcgataccataattcaatgcgcaattctttaaagaagatactagttctctatcaaacaatataaaactgtcccctgcttctggcatgtaatggtgatatataaaaaaaccacaaccaaaacttattattttttttataacatcactttcgtatccatgattgttggatagatttgaaatcagaggctttgcaggtggcgggtctaaactaagcgattttctcatttttatttcatttttcttttcaattatttgatatttatctaattccacacttaagtgctcaattttttcattactaccatatagataagcacctttatttttgacatttcccacactaattaatttcacatttgttgaattatctgcatttttatagaaatacatattagggaatgtatcattaatgattttcaaagaagtactagtagtaaatccataaggcccgtagttattgatatcaacatcatattgataacacaagcaataagctattgagtcaagatcagagcttattactctattccaatcaggaaccggaaattttattaatcgctctttgattaccatgtaaatataacctcttcgcctttagtgttaattgaatgaatatgtccggagtcatggtgtttaggtatatttggcatgccagcgtcaggatgtccatcgggatgttcaaaccattggttttttccattaggattccggcgacctaatttttgagcaccatcagctttcatctttccccatttatccccacggctagttggatttaaatcattcaagctaatgtcttgaccgccgcgagaaaccctcggaacttgtgcatgattttgagcttgccttaaagcatcatttcgacttttagcctttatgactctacaacttgccaagccccaagggtcgatccaactcagcggattcggcgcatattgatataaattcagtccgcccagtaacccgatcgggtcaggcgtgataaaccgaccgacttccggtgcataatagcggtaagtattgtagtgtaacccggtttcttcatccagatattgcccggcataacgcagcggctgcctgaactgccccagcggtttgctgaggttgcgccacatcgcctccgtctggcgggtcacctgcccaaacaccccatattgccctgaccacaccatgtcgccctgtttgttggtcacttcctgcggtgagccgttcaggtcggtatgataccaatacaactggtcttcaccgtagcgccgttcaatgcaggccaacggcgtataggcttcgttcgggtcgtaacagtaggtttgttggctgtctgcggtgcggctttgcagcaaccgcagtccttgccacagaaaatgcgtttcgtgccgctcctgccgggtgctcacgctcttgctcaaccggcggcctagcgcatcatagtggtactgcgcctcaaacaatcccttcggcccgtcccccttggcccccaccaaccggttatctccgtcgtagcgataacgctggatacgggcgctgtcctgcctgaccaccatattgccaaaggcatcatactgatattgccactgctcccagcgggtgaggcggttatcacggtaaggctcgctgccaccggtatggggtgaactctctggcgtctgtagcggcactatcagcgcattgtcggcccggtcataacgcaccgaggcttgcccactgtgtgccgagtagacgtgacgtagccgtccctcttcatcgtaaccatagctcacggtgccccggttgctgtcttccaccgcagccagttcatgcatatcgtcataatgataagctcgccacagaatcccttgctccggggaagtgagtgcctcggtaatccgatggctgacgctgctctgccactggcgacgccccagacggtcatactgccggtgctgcgtcagggtgccttgcgtgcggctggtttcccggtgcaacgcatcgcgctcaaattcactgactatctggtcattgaagcggatggcggtgacatgcccggagccgtagtggtgccaatggaactggtcgtcatttggcagtcccaacgtggtcaggttgcccaacgcatcgtattggtaggtcagcgcctcgacgccgttatgctccctgacgacccggcccagtttatcccgttcaaaagtgacggtattaggctggatacccagtttttcaccctgttcggtgggggtacggcgggcgctgagcagattgcccatcacgtcccactggtattccacccgttcggtctgtgtctggcgttcaatcacacggcctgcggcatcatagacaagctgactgggtttctcgggccgttggccttcatcgtctgccgtgccgcgttgggtgaccgcgctcatctgcccatcggcatcgtaagtgtagccataacgtgtatcgtccgggcgctgttcttcctgtaagcggccttccgcatcacggctaaagcgatacaccccgccattgtcgttatccagactgagcaaacgcccttcaacatcgtagttgtagcggatagcccggttcaggcggtcggtggtactcagggtttgcccacgtgcgttgtaatgccaatggcgaggcaggttgttccccaactggtggctgagcaacagcccagcttcagaccagccaaactgctcggtggagccatccggcaaggtcagtgtgaccagttggcctacatcgttatattcgtagtgggtttcctgctgcaacgcatcccggcgggaaagcagttgacccaaggtatcgtagcgccaggtcgtcggctggccggaacagtcggtgtaaagggtcatcaaccccagcatgttccagtctaagcggctctccccaccccgcgcatcggtcatgctatccggcaacagcgtgttgtcacgggggtaatgatactgagttgactgtaacaaccgatcggtttcctgtactacccgtccttgttcatcccattgggtacgttctgacgtgccatccggccagaacacaaaggtctgtcggtcgctgttgcgctgatactgccagcgcgttttcgcaccattggcctcggtgaccgacaccagcctacccagttcatcccactggcactggcgcagatgccccagcggcgagcggtaaccggcgggttgccctacgtcgtcccacaacagatgatgcgtgttgccagagcggtcggtgtaacggctgacacgacggtgttcgtccaacgcccacaccgtctggctgccatcctgccaggtggcaatacgttgacgctgctcttcatcataggccagtcggtagccatcgccttcactggtgtgctgttcaaccacacaccagatgtcgtcaatctcttgccactgatagtcacagcgcaatcccgtggcattctcatgccataacagcaaaccgttatgttcatcccagccaaagcggcgcatcaccgcctcaccccggtgctgtaccgccaccagttgccctttctcgttatactggtaacgggcacgcagcacctcaccagacaccgtgtgctgccagactgccgtcagacgattcagttcgggatggtactcacagcgcagggtttgcccacgggtacaggtgacgctctccatctgccgttgtgcgttgtagtggaatgactgctggttaccgacattatcgctgatgacacctagaggagcacggccctcggcatcaaaggccgggtagtggtaacgcagttcgcccgcatcgtggacagaccaacggccatcctcatgatgcgtgagccagcactgctggtcagggcagaacgtctggtggcctgcgggcacatccgggaagggaatgaagtcgccataggtgttacgccacagaataccgtcttccacctgccgcagttcactctcccagaacaggctccaaccgcgtcccagcacgccctcatagacatggctgctgagatagcgacgctgccagaacaggggtaattcaccgtcgagagtaaaatccagttcgtcgtcatcattgaggaatttctgcccggtcgtcacgtccaccggtttagccagaacgcctgccaccgacgctactattgccaacggggccaaccgacaggcgattttggctatcttgtccgcgcccggcagtttggcaaataacttttgaatcgcgcccggccccttgctggccgcccccccaaagcttatcaggcccgccgcaaacatcgtcaggtcagacacggtgtaggcccattggggaatttcagttgtgatgctttccgtggtggtcgtaccgccaccaataaacacgttgggtgaccccgccatgatggtggcatcacaggtggttttatcgctcttgcgggcggctggcaggccattgataaacacagaggatgagccctgagccacctgctgaaccttgtccttgtcgcagttcaccgtgctgagtgacgaaacagccgccgctttgccattggtaaagacattgcccgagccggtgataatggcaccgctgggactcatcgaaccggctccagcctcaacaccggcatcccgcgctttctcccccagggcgttcgccgccataccgacggcaatcgaggccccaatcagcagaataccgacaccgagacacgcagacgcgcacccggcagcaaacagcatcccgcccagaatgcccccggcaacgttgatgattccgcctaaaatcgttccaccaatcaacccggcgatagcctgagaatggccgatgggatcaccgacgcgtgccgcttccagcatgagtattcgctcctgtccgtgtgcgaaagattaggggtgttggtaactgtttaagcaatcagagaagaaggcttcatcctgttcactcagggcatgagcactggtcagcgtgaaaatcagcacggtggaggccgaaaccaaaaacgccgcctgacgttgatgcagtgtctggcctttttgcggatggtaacggtaaagcagcgtgatgccatggaacaggctatcgcccaagactgcgggctgttcgtcgagagcctggtacttgcgcagacctttttgcaatacctcacgctggcgagcgagataggcttcaaagctttcgtccgggcgtaactggtcacgggaaacattgagtgagggcttttgcggggcaatcaaaatattgacggtctgctcacggtaatcagcaggcaaggcgatactgccttcagtgaacacacagcgtaggtctgacacctgattcatccttgaaatccattcaatatccttatcaatgtcatgtatatttatcatactgcgatggaaaaatcaggaaaatcgataaaaatgcggctggttacatcatgctggctgatgtgtcagtgtcagtacatttctaggattatctgatgagaatgtaagtatcccagctttagttccacacactttttgagatttccggtttctcagccatcagccgatattcttccggcgtcagattattcagggattcatgaggccgctcactgttgtattcattcagccagcgctccgttatttcccgtgcttcattcagtgttctgaacagataaaaatccagtatttcggtccggtacgttcggttaaaccgttcgataaacgcgttctgtgttggtttgccgggcttgataaattccagcatcacgccatggtcttcagcccattgtgccagcgccagtgatatcaattccggcccgttatccatccgcatcttcagcggatagccacggtttgccgctattctgtccagcacccgcacaatgcgctgcgccggaatattcaggtcaatttcgatagccagagcctcgcggttaaaatcatccacgacgttgaaagtccgaaaacgtcggccacatgtcagcgcgtcgtgcataaaatcaatcgaccagctttggttgagggcttccggcgtggccagcggcgccggattacgcaccggcaggcgttgtttccctttacgacgaaaattcagttttagcagacagtaaatccggtgtatgcgtttgtggttccaggcgtatccctgcctgcgaagcacctgaaaaagcttcttaaatccayagcggggatagcgttcagccgcctcagtcagcctctggatcaccggttcatcacgtcgtgtattcggttgataacgaaacaccgtcctgctcagcgataacgtcctgcatgcctggcgtatgctcatcgtaaactgcgtggtcagatagttgacgagctcacgctttatcgctggttttaaagctttttttcgatgacgtctttcagcgcacggcattccagactcaggtcggcaaacatctgcttcagacggcgattctcgtcttctagatctttgatttttttgatatcagcggcttccatcccgccatatttcgccttccaattgtaatagctggcttcggaaatagcagcctcgcggcacacatctttgacggtcctacccgcttcgacggacttcagtacggcgatgatctggtgctcggtaaatcggatcttgcgcataaggatctcctcaggtgacatcatcagtatgtcggaagatctctaaaaatgaatgggccgtttaagcgggatacttacaaacagtttttataaaactattatctttaagaccttatttgaactgatgtagagcgtgtgttgtataggaaatggtacaacgagcatggattgagacgttgtgtgagagcttacaaaatgaccccaccttgactgaaacggagttataactagatgagccaaacaaccccacacccaattacacccgttcttgaaagttttaaagtggcgaaagcgcaacacctgaagaatgaagaaacctacgaagaaattattgcgtccattgcccgcagccagcaaaagcaacgcgacgccgaaaaccagagccaacaggctgacggcagttggcgcaaactgtttcgtagcctgcgtggtgaaatgacggatgagctgcaaaccgagcatatccgccggatttcacagcgggagctggcgcaagaattcgggcatctgattgaagaactggaactggataaagattacacgtcactgcaattatgtgcttctgcaagaccctataaagacacgcataaagtagcgttgatggaatatgcgaagatggaaatgtctgccgcaatgaaaaccctgtcacccgaactcatccgggcagtgaaattaaaggtcgctgtgaacgaactctacacagatacatcatcggagaaggctttgggtacacttacagcgactcttctttcattggcgggactctatacgtttgatatggaaaaagaatcgatattagccgaactcacactacagccaccacaaccgggttatgttgactctgctctgaacaatagtccgataaaatgtgcgcggttatttgaagcaataaaggtaaaacgggaaaaactaaacccagccggggagcaataattatgatgcgttgtcctgtgtgtaaacatgcgtctcatacgcgtgccagccgctatttatctgagcagaccaaagaggcgtattatcagtgtcagaatatagagtgttcttgtacctttaaatcgattgagagtgtggataaaataattacccgccctccgattaaagagcctgaaataataccagaggttattctaccagaacgaaaagtattaaatcgctacggttctaacgcacgaattcattaataatcccgctccgcctgtaacctctcaaggcagggacttttctccgactctcgccactttgcccttgccgtttaagggctttttctctggctagcctgccaaaatgagcactgcatgcatatagtgcatgattttgcatgcaacgcccttgcatcaaaacatctgaaacaccgcgctacaagggcttgtaggctctttatgtcatgcatgaaaagtgcatgataaagtcagagcgcgtaggcgggggaccattgcgcgcggatgtgtttgacacctatttttcaagctcacattacacttcgttgagaattctaaaaggtgttatctcaatcgttgatattgaccaacatattaaataacatactacattttagcatttttgaattgttatacttactcttctaaagcgagtgaaggcagactataaatctgccttctttatgagattaacaagcaatttttaactgagggtaaattacaccgcgaagttcattcggaatagtgtcttttattacttcaattaaactatctctacttgaaaccaaaagtgctaattcatcaagtaaaatgtttaatttactgttacgatcccattgcgttttatagggtgaagaatttatcttttgatcaactatctgcaatcgtctctcattatcatatatgtacctcgttttcacgatgctatgagaatcttcgatagattcctgatacgtgataattagatgaaccattccatttttcttaatagtttcaatgctttcgtattcgttatcaaaaatagcagtaaccaactcttctggctgaactcccttcaccatgcaaaaggctattattttattaataatatcttttattttcaattggttagtcatcttatcatcctctcaacttcttttaaaataccgggcaacgcatctatagactgtagcagagttttattatcacgctcatccacacgcccaaaggcttttgacaattttaaattaatataacgcatcaagataccatcattggcgtccgttggtgctatatactgcatatgacgaccaaaaatatcatatagttctgaactcttctcaccaatacctttatcattcaatagattagcaacttcatcttgggttcttgtcttaaggatttctcgcattctttttcttgcgatatgtggtcgtttttcaattagctcaggatctataatatcagcaactttacgcgcctcctcctctactaatgactttttcaacccttcaattgctgaatcggataatgtaataccagctaatcttattttttctatttggctagaaacagcttcacttatttcagctcttttctgctcaaaaagagcattaaaatcgatatcatctaaatatgaatcggtttcacttacatacgcaccatcactagcaattcccgctagagcttgctctctctcaacataatcacgatcgctaaatatatattctctaacactagctctttttgccctgtccacttccttttggaaagtatcccacattacatttagaccaatttcctcatgaaagataaccaaaccattattatctatttcaaaagcagcaatctcattatctggtatggcccttaatatacgccctacaacctgtgcgaatgcattaagacttctatatggtctaaatattgccaatatacttaaatacttatggtcatacccctccattagcatatttactgatataaccacatcacaattattattgtctatctctttaaacgaggtggcgattctttcaggctccatctcactatgaattatagtagctctcagccctttttctgtataccacttatatagatcttccgcatgagtgatactacaccctacagctaatatcttatgtggcacagaggttgatattttttttagctcatctaaccgacggatgctatgttcaatcacatctttagagcattcctctgataacgctacgctcttttcaatccattctttatctttaagcgcaagaacatcatctttagataacttaacacctggcatatctggcgtataaaagaataactcactagcattaaccgtttctttccttagccatttaacatatttatctttcatgacctcagacaatggcgtttcatgtattttcactccgggaacttcctgattatccccccgataaggcgttcccgtaacatgaagaatcttagcattagaaaaatattgtattgcgtcacgccagctttgtgctggggcatgatgagcctcatctacaataattaaatcaaagtaatcaggagcgactcgattaataagagttgtacttctattaccagaaattctatgaatattagaataaacaatatgactactttctaagtgttcatctgatatatctgaaacatattcatttacaatcggaatatctttactgctaaacataacatcgcaattaacccaaaaattatcttctaacacttcttgggttttcctgatgctgtctttcgtaaccaagccgggtgtaataattaatactcttttctctgacacaccatagggtgcaatcgatatcaacccactttttcctgtacctgtaggcaacacaaccaaggcctcacgattttgcggatcgctaaaaaactccctaatctttatgtatgcttctacctgtggtgttctaagctttttatttccttcaatattcactgctgtgtcaaaaaagtaagacatttatcttttccttgattacaccaaatataatttatatgaataccactgcaacatatctcttcgcttttcaagatactgtgcatgattataagtaccgcgaatactattcttatcaacgtgagccaattgtagctctatccatgcactatcatagccttgctcatgcaaaatcgttgacatggtatgtctaaatccgtgacccgtcgcacggcctttataacccagtaattcaatgacctgattgactgtttctttacttataggctttttacggtcatttcgtccaataaaaatataaggataatgtccggtgataggtaagagctgtttaaatagcgctataacctgcgtagacaacggcacgatatgagggcgacgcatcttcattcgttctgctggaatctcccacaagccgctctcaagatcgatttcctgccaagtagcaaaacgcatttccttagttcgtacacccgttaaaataagtatcttcgcggcgttcttggttatgatgctgccggtataaccctctagatcacgaataaaatatggcatctcttcggcagacaggaacgggtaatgctgtttctttggcgtacttaatgcgctggcaaggtcaggggcgggattatatgcagcccgaccggtaataatggcataacgaaatacttccccgcagcgctgacgtactttgcgcgttttttctaacgctccacgcttttcgatacgttgaagcacatcaagtaactccagcggtgtgatttctgcaattggccgtttaccaatatacggaaatatatccgcctcaaaggtactcatgatttcttccctatatcccaaagaccaacgatccgctttagctttatgccactcacggctaatggcctcaaaagagttttccgatgaaagccgctgcgctaacttctcagcctttttcacctctgcgggatctgttccatctgcaaccagtttacgtgccatatctcgcttagagcgagcttcagcaagggatatcaagtcataagtccctaatgacattaatcgggctttaccggcaaaacgatagcgaaagcgccagcctttgctgccattaggttcaattaagagtgatagcccttgcccgtcactcagggtataggctttttcttgtggtttagcacggcgaatctggatatcggaaagtggcatgtgtatagctcaaaaaggtatagggtaattctataccctttactatacacaattgttacgaatttagagagataagctcggacacctacggacaataaaacgctctatctattggttttactggggtttttaggactttcggggagtaatacggaagagctttggcggaagatcacaggagtcgaacctgccagggaccgctggcggccccatctggatttgaagtccagccgccccaccgggagcgatgatcttccatagataatctttatgtaagctagcgattataacgcgtttattcaacaaggtattagaaatcagtcaggcattttcaacattgttaagttgagcagaaatctgcgtaacccttggtaaaagtgagtttttctccgtatggcaaccatacaaaagcctactgttggcagcctttgcccgtaaaccatggcgacagtctgcccaaatattccccaaatattccccaaattcgctgcaaccttatgaaccagagataatcgcacggcaaattgccccgtggcagctaaagctcaattctggatgagcaccgtaatcattgatataagtgataaccggcgaggggtaattttctgcaaccagttcgctgctggacataggtgcgaccatgattgcaggaaaatcctcttttgccgccgctccgcttctggccgccaagccgattaccgtcagataatagggcgtcggattctcgagccgatatccctgagcagttttgtgcaatatgacgcgctgctgccagatttcatcgggctgcggcacaatactcaacgggcggtaaaacagctttattttggtttgtagcgctacctgtatcgcatcgggaatatcgctacgcggcggtatttctcgcaacgtgtaataaaacagcgattcgcgatcctgaggcaatgttttcgcatccagtgtggcataaatgcggacgatatttttttcacccgaattcaccctctgtatttccggtgaaaccgccaacggcacagaggtgctctgcggagctacattttcgatccacgattgagccagataaggcagagttttattctcattccgaatactcaggttaacgaatccgacatcagccgtataaataactcttgtacgatccagtacgatagcggcattcgccttgtaaccaacgaccatcaaacaggtcaatagcgccattaattgtatttttttcatagcgagcccatccttgcttcaaatcatacataacaggacgctatatcattcctcatatcatcagtaactaatccgccgttcagcatactaattgcagcttatatcagttaatgcatggttattgtcattagcctcgaaataacctgatataaataagtagaaagaggcgaataagttaacgaaagcgaattatttttgatgactggaacgggcctgtgacatgtctaaaaaacagaaattaggcagaaaaaaatatttaaaacaacaaattacctacatcaactcattcagatggcgatttcataatgcggtgaaacccccaaactctttagcccgcagttatctacgggcatagcttgatcaactgactaatcttcttttatcaatacgctgtaatcctatagataacaacatgctaccacccaacgcgaaagcgaaaacatagaaaatatccagcgccggataggcggtaaaatcaaagtggtgggtgcgcacaaagtgaataataagcgcgtggaaaccataaatcgcaagagaatgacccgaaagccaggttaaccaggctcgtggctgggaaaggcagtttttaaaccagattagcagagacaccgccgcaataaagaccagcggactacagtacatgtagaaggtatctgcaaaatttccattgataatactttgtttttttgtcgaaatgacgatcaatcctacgctcacgataaaagcgaacgctgctgcccaacttatcgattttccttccgtattcagcataccaatcgcccggcctagcattgcgtatagcaggtaatagaaagtatctccggagatatacaggtttacaggcagtaaatggaaaccatcgagagagaacttaccggtataaggattggcaaccaccgccagcaacagtatgactacggcaacgtaacggccggatacaggcttgacgttaatcagcggagaaaccagatacaccacgattatggcgtagaaaaaccacaggtgataaaacaccggcttttgcaaaatattctttaatgaagcccagccgcctatcggcgtcagtgtggatatataaattagagcaatagcactataaaaagtcaggcatagaccgatgcgtataaaatgcttcttaccggcacttttttcacccaaaaacagataacccgaaatcataaagaacaaagggacgccaacccgagacatggaattcagtaagttagataaatcccagctgaattcaccgaccgctgctccgctggtgagatagtaagtggtggcgtgaatcataaccaccataatgcaagccactgcccgcaaattatcaatccatccaattttattggtcatgcctattctctgttgctcatgcatttgggccaaaaaagttaacgataagttatatactaagggcgctaaaagtaactcaaaaagaaatactcgcccaaggtaattaagaatctacctgcatgtaaatcgttgccattattcattattggcggcaaaatagccgtcctaactcgtctcgacagcttttctcgctgaggcagttccacttttcttattaattattaataacttaatctatgcaaactacgttaacacccgcgaaacctttaggccgccgggcgctgttgtttcccctgtgtttagtcctatttgaattcgcagcctatattgccaacgatatgattcagcccggtatgctggcagtcgtcgctgatttcaacgccagcatagaatgggttcccacatccatgaccgcctatttagccggcggtatgttcctacaatggctgttggggccgctttccgatcgccgtggccgtcgtccggtaatgctggcaggcgtggctttctttgtcattacctgtctggctattcttttggtcaataccatagaacaatttattgctatgcgcttcctgcaaggcattggcctgtgctttatcggcgccgtaggttacgccaccattcaggaatcattcgaagaagcagtatgtattaagatcaccgcgctgatggcaaacgtggctctgatcgctccgctacttggccctttagccggtgcagccttgattcacgttgcgccgtggcaaagtatgtttgtgctttttgcggttctgggggcaatttcgttcattggcttatggcgagcaatgccagaaactgcggtgttgaaaggtgaaaagctctcgctttcggccatgtggcatgattataagcaagtgctggctaaccgtcgctttctgtgcggagcattggcattaggctttgctagcctgccattgttggcttggattgcacaatcgccggttattttgatcagtggcgagcagctatcgacctttgactatggtttattgcaagtgcctattttcggcgcattaatcattggtaacctgacgctggcgcgtttgagtggtaaaaccagcattcctaaactgattaaactcggcgcaggcccgatgatcggtgggttgatattggccgctgtttcaacgctttattcatctcacgcctatttgtggatgacggcgggtctcagtttgtatgcttttggtattggtgtagcaaatgccggtttggtgcgtttgaccctgtttgccagcgatatcagtaaaggtacggtttctgccgcaatggggatgatcagtatgtttgtcttcactttgggcatagagttggcgaaagtcgcctatctgtggggaaacagcggtatcttcaatcttttcaatttaatcagcggcctgctgtggctgtcgctggtagcaatatttattcgtaaacagcctgaagctgtagctgcggaataataaacctggcactgatgatgtgaacagatgggttcggctaatgctgaacccatttttaatggtcatggaatctataaagcatcggtaggaatgtattcatcacaaaatacatcactattgatgtgtaatctggtagttacatcagcaccgatgcactaacaaaacatacctcggtcgcgcagaatatggtcgttgccacggcggcgggtaaagccgctgcgatcgaaaaattccagaatttgaatcgctaacttacggccgacgccaaggctgtcgcggaaatccgctgcgctggcgctacctttgctggcatccagagtacgaatcaaatcggcaaactgatagattctgcgattcagatagtagcgatccggcacaatcgcggtgatatggcccaaacgcgcggctttacgcaataatccacgcatcgactcttcatccatttccagcgctacggccagatcccgcacccaccaagggtcactttcaaaataaacccgcgcacgcagccactgtttttcctcttcagctgtaaacgccaaactgtgttcaggtaaatgcagccagccgcgcgtattcgctaattcgccgtcggcaactaattgatcgataacccgattaaccaaagcctcatcaagcgtcggtaaagccatgcggcgcaggcgggcgcggcccaagcccaactgatcgctgtgctgctgatggtaactggcgagcacttgcagcaggttttgccgggcattttcagccatcgcagaggaaagtacgctatcgccagccactaactgttggctgtctgccaatagtttatcgagttgtccatcggataattgacgtgcccaggcaaactgttgaatcgataccggccttttatccaattgaaggttaaggacttccgcatctgtcgtggcctgagctagcgcagtcagccacgccaaaaacgccggctgccgcttacctcttttcggggaagacagagcgatgactcgagcgccacccagggtgtgctttgccgcaatgtcacgcaggataaagcgatcgttttctgccagatacagcggtgtatccagcaataattcggccaacatcggggtttctgcgccattcagcatggaaactcgaccggtaatatggctagcaccttgatgtaaatgcagagattgccaatgatgcatcggtgtatccgttgtgacttccaccagcacccgatcctgcgcttccggcggctgtcgctccaatagccaatcgccgcgagaaatttgctgtttgctggtatcgccagtgatattcagcgcaatcctttggccagcctgtgcatgagtggctggctcattctgcgaatgaatacttcgtacccgaaccggacaatcgctgccggttaaccacagagtatcgccaacggctacttgccccgctagcagcgttcccgtcactactaatcccgaacctttcaggctaaaagcccgatcgattgccagacggaaccgccgttgaatacgttgagcatcgctagcctgctggctaagctgcgtcagatgagcgcgcagttcgtcaataccgactccgcggttagcagcggtgataaacagggaaatctgatcggcagcccagccttgctgtgccagttcggtcaaaacctgctggcgaacctgctcaatctgttgctcatcggcacgatcggctttggttaacgccactgtcagttttggatggccactgaggcgtaaaatggccaaatgttcatgtgtttgcgccattacgccatcgtcacaggccactaccagcagagcgtgatcgataccgcccattcctgccagcatattggacagaaacttctcatgaccgggaacatcaataaaaccgagactactgccgtcgggctgtggccaataggcgtagcccagatcgatagtcataccacgctgtttttcttccggcaaacgatcggcatttacgccggttatagcctgtaatagcgtggttttaccgtggtcaacgtgaccggcggtggcaataatcatcaaacaagctccctgagcaaagcatcttcatcatttaaacaacgtaaatctagccacatgcgcccatcccgaagatgaccgatcaccggctgattcagacggcgccagcggttagccagcgacagcagcgtactaccccgcccgtctttaggtgtgaaagttatcgcccaactgggcaaacgatcgaccggcaaggaaccactgccaatctgcgaccagcattcttcgctggcaaggtcaaaatccggataatgcgcgctaagctgcactaataggcgctcggcgctgtcacgcatctcttgctgcggacgagtgagtatgcgcagcgatggcagtaaatctgccaaccgatccggttgttgataaagacgtagtgtagcttctaatgctgatagggtcattttatcgacccgcagagcgcgtttgagcgggtgctgctgaagtttggcgatccagtgctttttgcccagaataatccccgcctgcggccctcccaacaatttatctccggaaaaagtgatcaaatcgacgccagcggcaatcagttgctgcggcattggctcggcaggtaatccgtattgggtcatatcgattagcgaaccgctgcccaaatccgttgccgtcggcacagaaaattcctgccccaaggctgttagctgagattccgttaccgcggcggtaaagccttgaatactataattactggtatgaactttcatcagcagaccggtattttcgccgattgcctgccgataatccttcaaatgagtgcggttggttgcgccaacctcaaccaattggcaacccgcctgacgcatgacgtcaggaatacggaaagcgccgccgatttccaccagctcaccacgtgaaaccacgacttctttgcccgccgagaccgccgccagcatcagcagtaccgccgccgcattattgttaacaatacaggcgtcttctgcgccggtcagttcacagagtaaatccgctaccgcccgatcccgatgcccgcgtccagcgtcaccgaggtcatattccagcgtcaccgcgccgcgcatcgccgccgtcactgcgttaatagcagattcagccaaaggcgcgcggccaagattggtatgcaataccgtaccggtcaggttgaatacgggtttcagggcgggttggcgttggttaatccgttgacgtagttcggtaatccagcagctatgccagtgcggcagcgtctgagtctggcggataatctcgcgggcctgcgtttgcattttccgcaggatatcagtgagtagcgtcgcgccatattcatccagcaaaggagccatttctggctcccgcaacagacggtctatggcaggtaattggctataaagttgctgaggttctgcgctcatagtcactcaaatcagggagataacggaaagttattcgccggggaacaggaacggattaacgctactgcgggcgaaaccttctccttccattttggcatccagaatcagcgaggccaaatcatcagccaccgcttcaacctgcggatctttttcctgatacagaatttttagataagtgccgcaatcaccacaactttctgcttttaccgctgccagttcgctatccagtgaccaataattcagatcgcggctttgctcgcagttactgcattttatccgcacgacgtgccattcgctttcacacagattgcagtgcaggtaacgcaggccgttcaccgtaccgatatgcaccacgctggaaaccggaatactgccgcagaccgggcagaactgacggtgttcaccatattccgcacgagctttaccgggaatctggctggccatttgcgcccaatacagcgatagcgccgcccagataaacggggatttctcactgccgatcttgccgaattcgcgattcaacaatgcgtcagcgtagagctccagctcatgtaccgatgatttttccagattatccagcacgacctgaatatgctcaggcgcatctggacgcagttcggcaatcagcgccgacagcaacaaacgccagtgctcagtacgaggaaatacgctcgcatccaacggcggcttgccgctagcggccgagtgctccagctccgcccgcatatccaacgtcagcgggtgatcgtgcagcgctttttgctgcgcttcggtaattctggcggcaaaatccagataatcagacaacggattatctagcgccagttgccgtaaacgttcggttcggcgggtatacaggctttttaaattcgcgaaaagtaacggcgggattgtccccgccgttgatgctctttcgctttgttgactaagttggtccttagggacaatgcgaatactcatttcagggtttctcttcctgttttttctgacggatttcccgataccagcgcggatggtgctttttcgcccatgccgcaggtacccagccttccaccatcgccgttatcgtgcctttcacccaaatggccgcataaatgtgaaccatgatgacgatgatcagccccaccgctgccaatgagtgcaccagtaacgccaggcgaatcaatggaatcgggaaatactcggcgaagtaaggccgccagataaccacaccactggccactaacagcaccagacttataattgctgcccagaatacgcatttctgaccaaaattatagcgtcccgtgtcgcccacttcctcattcatggcaattttgtggatatttttcgcccagaccaggtcttcgcggttgatcaggttgtgtttccagtaacggaaaaacatgatcataaacgcagcgaacataatcaccccggcaaagggatgaagaattcgcgccagctgcggcgtaccgaagatgttcatcagccagttaaaggaagggaagaagaatcccagcccactaatggccgccagcataaagcagaaggccactatccaatggttgattcgctccggtgcgctgtagcgctggatcggcttttcttttttcatttccgcgtctccccgtcttgctgttcggaagatggctgagtagatgacgatgaatctgacgatgcagggacggatttatcctcttcatcctcatcttcttccacccggttcgggccaacgccaacatagtggaaaatactggcggcaaaggtggcagcaaagcccaccgcagccaatggtttccaaatgcctttccagaaggtaaccgtcgggctaatggtcggattttcaggtaaaccgtggtaaagctgcggtttatccgcatggtgcaacacgtacataacgtgagtaccgccaacgccagccggatcgtataaacctgcgttatcaaacccacgggttttcaattctgccacgcgcccagccgccacttccttcatcgactctttagtaccaaagtgaatagcgcctgtcggacaggttttcacacaggccggttcctgacccacattaacgcggtcaacgcatagggtacatttgtacacccgattgtcgtccttgttcatgcgcggtacatcgaaaggacagccggcaatgcagtaaccacaaccaatacaatgctccgattggaaatccacgatgccattggcgtactgaataatagccccttccgacggacatgccttcaggcagcccggatcggcacagtgcatacagccatccttacggatcagccattccagcttgccgttttcctccacttcggagaaacgcattaccgtccatgatttagcggttaaatcggcggggttatcgtacaccccgacgttatgaccgacttcatcacggatatcattccattccgagcaggcgacctgacaggctttacaaccgatacaggtggtgacgtcgataagcttcgccacttcagcctgatagttacgatcctgcggcggtggcgtcagggaatgagtaccggagcgccgaataatgtcttgagattgcagtgacatagttgttctccgttacaccttttccacgttaaccaggaacgccttgaactctggcgtttgcgtattggcatcgccaacgaacggcgtcagggtattagcaataaagccttttttcgctaccccttcataaccccagtgaataggaataccaatggtatccacttcctgtccgtgaaccctcagcgtgcgaatacgtttggtcactaccgccttagctttgatatagcctcggttagagctgactttcaccgtatccccgtgcttaatgcctttcttctcggccagtttttcaccgatttccacaaattgctccggctgggcaatagcgttcaataacgcatgcttagtccagtagtggaaatgctcggtcagacgataagtggtgcccacataagggaattgctcatgggagcccatactttccaaatcgtctttaaatacgcgagcggccggattggaaatcacgttcggatgcagcgggttggtacccagtggcgtttcaaacggctcgtagtgttccgggaacggcccttccgccattttgtcgatggcgaacagacgccccatcccttccggctgcatgataaacggcccgacatcactgcctggcgcggcggcgctgtagtcagcaacatcgactccagtccatttcgctccgtcccattccagcagctggcgtttcggatcccaaggtttaccctgtgggtcagccgaggcgcggttgtacaaaatacggcggttcaacggccatgcccatgcccaacccagcgtattaccgaggccagacggatcggcgttatcacggcgtgccatttggttacccgctggcgtccagctaccggcaaagatccaacaaccgctggcggtagtaccgtcatcgcgcagatgagcaaaggtactcaattgctcgccttttttcaccagcactttgccgtcggcatcggtaatatctgccaatgcgcgaccgttgctttccatcgccacttcttccggctctggattgtctggcgtcaggtagtcccaggtcatattgagcacctgttccggcaccgcaccgccttcacgctgatacatctcgcgcaagcgcatcagaatacccgccagaatgccaccgtcgttcatggcttcgccgggggcgtctgcgcctttccagtgccattgcaaccagcggccggagttcacgatagagccgttttcttcagcaaaacaggtagatggcagacggaacacttcggtctgaatttttgacggatcgacgtcgttaaactcgccgtggttctgccagaaattcgaggtttccgtattcagtggatcgatagtgaccaggaacttcagtttggacagtgaagctattactttgtttttattcgggaacgaagcaaccgggttaaaaccttggcacagatagccgttgaccttaccctgcgacatcatctcgaagtactgtagtacgtcgtagcctttatcccatttaggtagccaatcgtagccccagctattttccttctgcgctttatccccgtagaaacttttcatcatgctgacgaagaatttcggatagttactccagtagttcacctgacccggcaacagggttttcggcgtattggcagcaagataggtttccagatccggctgtttttcggacggcaggttcatgtaacccggcaggctttgcgacaacaggccaaggtcagtcagaccttgaatattggagtgaccgcgcaaggcgttaaccccgccaccggccatgcccatattgccgagcagcagttggatcattgccatggtacggatgttttgcgcgccgacggaatgctgagtccagcccagtgcatacaggaaggacgcggttttatccgcagcactggtttcggcaatgtattcacaaactttgataaaatcttcctgcggcgtaccgcagatattgctaaccacttccggcgtgtagcggctgatatgttctttcagcaggttccaaacgcagcgcggatcttgcagggtgacgtcccgtttggcgtagccgttttcatccaactgatagttccagctggttttatcatatttacggttatcggcgtcgtagccgctgaacaggccgtcttcaaaggcaaagtcttcccgcaccagcaggctggcgttggtgtaagcctcgacgtattcgcggttaattttttcgttggtgatcagatacaacagtacgccggataggaacgcaatatcggtaccggaacggattggcgtatagaaatcagccaccgatgcagtacgagtaaagcgcggatctatcacgatcagcttggcattgttgtggatcttggcttccatcgcccagcggaatcccactggatgcgcttcagccgcgttaccgcccatgacgataactaaattcgcgttcttaatgtcaacccagtggttggtcatcgcaccgcgaccaaatgttggagcaagacttgctaccgttggtccgtgtcagacacgtgcttggttgtctacggcaagcatgccgagagcgcgactgaatttttgagtcagataacccgtttcgttactggatgcagaggcacacagcataccggtgctgagccaacggttaacggtcacgcccgcttcgttggtcttaatgaaattcgcatctcggtcttctttcatcagtttggcgatacgagtaaaagcatcatcccaactgattcgctgccatttatcggagcctggcgcgcggtattctggatatttaagacgactttcgctgtggataaagtcaatcaggccagcacctttcgggcaaagtgcaccacggttgaccgggtgatccggatcgccttcaatgtggaaaatactctctttggcgttttttgcaccgtcgccgaggctatacatcaatagcccgcaaccaacggagcaatatgtgcaggtattacgggtttcgcgggctcgcagcaatttatactgtcgcgtttccgccaacgccaccgccggcgcaaagccgagtgccgccgccgtggttcctgccataccgccagcgcagatcttaaagaactgccttctgctgacctgcatgggtctctcctcaattcacgattgtcacagtgtttttaacaggcgctttccccgataaaggcgtcagcgctaaaatcgttatctcactaccgctttgccgcgatagagaataaggttcacagccttatccttaccgtggaatactaccacactgtcattatgggatataacactcaggatcgcatcagtgagccagatcaaaccagcacaaacagccaattcgaccgatgtttgcggtgccagacaactcaagctgtggcagcggcaggacttaaccaccactcagcccgactggctggcggaagaagtgcctattgctctggtatataacgggatttctcatgtcgtcatgatgggaacgccgaaagatctggaggcttttgccctcggtttttccttatcagaagggattatcagtcgcccgcaggatatttacgctatcgacgttaatcccacctgcaacggcatcgaggtcgcaattgagctatccagccgccggtttgccggtttgaaagaacgacgccgagccatggcgggccgcactggctgcggcgtgtgtggcatcgagcaactggccgatattttccgcccaataacgcctttgcccttcagccaacgttttgatttaaaccatttggatagagcattggggcagctaaaacaggtacaaaccgtgggccagctcaccggttgcacccatgcggcggcctggattaacccagaaggcgaattattaggtggctgcgaagatgtcggtcgccacgtcgccttggataaacttttaggactacgagccaaacagccgtggcagcaaggcgcggtattggtttccagccgcgccagctatgaaatggtgcagaaatccgccatgtgcggcatcgagattctatttgccgtgtctgccgccaccacgctagccgttgaggtcgccgagcgttgcaatctcacgctggtcggttttagcaaacccggcagagccacggtatacactcatccgcagcggttaatctaaaggcggtggcttttattggctcaatactgagttaaagctgcacatagaggatcgaaccacgcggtgaccttatttcgctttagtgcggggaagagggggcagcagagaaagccatcattcttgagtgtgaagcacaaaaaaaaagtgcccgtcgtatcgaagagtgattgaattaaaaagaatattaaaagtttcgtcacacattcattttatcgagaacacgcagtaaccacacaaaaactacggcattgataatcattttcaatatcatttatttaactataatgatccgaatgcttacgtggcgctcactttttttgcgccgctctacactacggagacgatgaatatgagttactcactgccatcactgccttatgcttacgacgcactagaaccacatttcgataagcagacgatggaaatccatcacaccaaacatcatcagacttatgttaacaacgcgaacaccgtgctagaagcttacccggagctggctagcctgagcgtggaagaagttatcaaagacctgagcaaagttcctgctgacaagcgcaccttcatgcgtaacaacgccggtggccacgctaaccacagcctgttctggaaaggtctggcgctgaacaccacgctggaaggcgacctgaaagccgctattgagcgcgatttcggtagcgtagacaaattcaaagaagaattcgaaaaagctgcggcaacgcgtttcggttctggctgggcgtggctggtgttgaaagacgacggcaaactggccgtagtgtctaccgctaaccaggatagcccgctgatgggcgaagcggtttctggcgcatctggcttcccgattctgggtctggatgtgtgggaacatgcttactacctgaaattccaaaaccgtcgcccagactacatcaaagcattctggaacgtggttaactggaacgaagcggctaaacgtttcgctgaagcgaaaaaataagcccgattagccagagtcagcgcgggtttccgccctttctcgctaatgaccatgccggcagctggattgccggcatttttttgcctatagaattcccgctgatggcgcagatacatcctaagcacatcgctatttccacgagtatctcccccatctcaccgcagggaatagcaccagaacggctattaacagcgctttttattgctaaagtttaaccatgagttgccgatagattgtacaagaagaactattgcccacatcgctattgagaaacaaagcctgagttaaacaggctagttactgctcaatagttaaaccagcaataatcattccccaaataactagacccttccctgaattcaccagcgctgattgatctgtcttaggaataccgcataacggagaatagtatggctgcaatgagcaatttatttggaagctttgagaacgtaaaagtagggaaaaaactgggattaagttttttcattatgctgctgctggttagcatcatcgcaggtaccggggcttaccacttttccgagatcgaagcgcgcgcctataaggttgacctgagctatcaaattaacgatgaagtgaaccaggcaaagtacaatcgggcgctgtacgaacgatcttacgatcccgcgtttatgacggttaacgccaaacatatcaataatatccttacactgttggcgcaaaaagagaacatgaactggagcgctgaaaaccgcaaaaacatcgatcgaattatcgaagtgattaaagcctatcagctggaacagagagagtttctggctacggttgaacgaaaagataacgtccgcaaaagctggaacatttctgaaacccagaaatacctgaatcagcttgaacagaacttcctgaatgaaggggcagataccaacacccgcatcctactggcagaaatgaaccagaaactgatggcggtacgctataatgcccgtgggctgctgctggatcgtaatcaagaggcagaagactcgatgattaccgcgattgatgtggcgcaaaacgccgccaacgcattcctgccggtactgtctaccgaacaacagaaaatgatggcaccggttatcgacagtttgaaagcctataaagcgaatattctggcttacttaccggcttacgaacaggaaattgccgcaggaaaacagttagaaactaaagctatcgagctgaattctctggttaaaaatctgtttgttcaggagttacaaggcactcacgatgaaatcgacaatgcgcagacgcagatgaccgttgtcgcaatggtggcgcttttagttggtttgttaatcgcctggcgtattacccgccagattaccgtgccgttgcgtaccacgctggcgatggcagaacgtattgccaccggcgatctgaccgcggccaccacctcatctcgttccgatgaactgggtctgttaatgaacgccgtggcgcgcatgaatgaaaatctgcgcagcatgattgatgatattcgcattggcgtcagtcaggtttctcatgcctctggcgagattgctgctggtaataccgatctatcatcgcgtaccgaacaacaggccgccgcggtagaagaaactgccgccagtatggagcagctaaacgccaccgtgaaacagaacgccgataacgcacatcatgccaatcagttagccaccgaagcttctgataccgcgcagaaaggcggaaaactggtaaatgacgtagtgcgaaccatgagcgatatttccagcagctctaagcgcatctctgaaattacctcggtaatcaatagcatcgctttccaaaccaacatactggcactgaatgcggcggtggaagcagcgcgagcaggcgaacaagggcgcggttttgccgtggtcgctagcgaagtacgcaatctggcgcagcgcagcgcacaggcggcaaaagaaatcgaagggctgatcgccgagtcggtttcacaggtcaataacggcacttctttggtgcaaaatgccggtcaaaccatggagaatatcgttcgttcggtgacacatgtgcgcgatattatggcggaaattgcctctgcttccgatgaacaaagccgtggaattacgcaggtcagccaggcgatatctgaaatggatagcaccacgcagcaaaacgccgcactagtagaagaatccgctgccgctgccgattcgctggccgagcaggcgattctattggcgcaggccgtcgccgtattccgtttatcggaaaacacggaagccgacgattcggctcaggttgcgactaacacatcgccagccgcatctcgtccggcatcagataatgtaaaaacaaatcagcaggataactgggaaaccttctaatcctcgcactacgggagccgcttcgcgtggctcccgtccattcactcataccgattaaccctaagttatccatacaattttgccattggtagccagactgattgcaaggtattctgaatcttaccccgcgtaagcagacaaggagagcttaatggtttatccgcaggtctatatcggtaatatcgagccttaccccggcagcagccccagcgccattggtaagcgccaaacggacggcagcctgatgctgaagccgttaggattagaaggtgatgagcaggctgaaacacgctttcacggcggcccggatcgcgctctgtgccactatccccgcgaacattacgctcattggcgccagcaatttccagaacaggcggataacttcaatgcacccgcttttggcgagaatatctctacggaaggcttaaccgaacagaatgtttatatcggtgatattttccggtggggagaagcgctgattcaggttacgcaaccgcgatcgccttgctacaaactcaattttcacttcgctattgaggatctttcggtattgatgcagcaaaccggtctgtgcggctggctttaccgcgtgatatcaccgggaaaggtgagtgacgaacagccgatggcgctagttacccgttgctgcgatatttcggtcgctgaggcgattgccattgctttccatatgccgtttgatgaagaagaatatcgccgtttacttggtgccgccgggctgtctgctagctggagcaaaaccatggtgacgcgattgattcatggcgaaatagagaatttcaatcaccgcctgttgggccgggcgagagcctaaagatttgatctgcgtgtttcacaaaaaacatctagatatctgactaatacattagaaaaaaccgggttgatagcatggccatcaactcggtttctattacaccgctgataaaaatcagaacgcttttttcgcgtaaccggtcacttctttcagccccatttcacggcctagcgccgtcattgggtgcaccacgatcaaaccacgagccacttttttcagtgaacccatatcggcctgttcttttttggtgatggctcggctgaatggcattttggtcaattcctgcgcctgaacgctcaggttttttacccgaacctctttcaaacgctgaatttcagcagccagtttttctttttctttcatatgctgggcgatcaaatcaacgttaccctgttgaatgactgcggtatctttgtggttcaatgcatccagcatgtcgctcagacgtttgatttctgcttgttctttcataaagttggcccgtacatgccactgatgggcacgaaaattcgctaaagttggaaataggatatcacctatagtgtatcaggatgcgcttctttcgacagcccgcacctgagcagatcaccagccaacgcctgcgggtaatccactgatctcacaggctgccgctcctaccaccgccaaagcctgggtataactatcgttaaacggatagcagcatgacaggcggaaagcgtgacgatagcgcccgctgggtgaatatagcgtgcccggagtcaggcaaatatgctgttgcagcatttgatgatacaacgcaacggtgtccaccgagggaggcaattctacccaaaaaacgaagccgccggcaggtcgggtcgctttcgttcccaggggaaagtgtcgattaatcaagatacgcgcctgctccacctgagtagcgtagcggcggcgcaatccgcgtaagtggtgatcataaccgccggactccaaaaacagcgctagcgtttccgataacaacgccggttctgccatcgaagaaacggcttttagcttgtgtaacgcttcggaaaaacgaccaccgtcaatccagccgatacgaaaatcaggtgccagcgtttttgtaaaactagagcaaaatagtatccaaccatcccgatcgaaagctttcaccgctggcgacaaactgctgccaaactgaatttcagcgtataaaccatcttcaataagcggcacctgatgatcgttcatcaggcgggccaaccgttttttggccgccaaaggcattgtgtaaccaagcggattttgcaccgtcggcattgcaataaccgcattcagccgcccttcctgaagcagcaattccaacacatccaacgataacccttgcagcggatcggtcggaatttcaatggttcgcaaacctaaactggctaacaatggcatcagatagaaataggtcggcgattccagtccaacgcagtctcccggtttagtggtgacacgcaacgccagctgtagtgcctccatacaaccgtgagtaatggttatctctgcaggatttgtcaccatccccaaagttagccctcgacgagcaatttgctggcgcaaacgctgactgccaggtggtaatgcgtatttgctgattaaatccggctggcggcgtagcaaagaagccatcacacgccctagcttggcgctgggataaaaatcagatgtttgtgggcaagccaatgaaatattagtaaaagccgggttggactgagcggcaaacaccgtttctatcaaatccagcacctcgtccaccggtttactagccgaaaccgttggcaccagcgcactggaaggagtgcaaacataaaaaccggactgcggacgtgcctcgatcaggccacgatcttccaacgtacgataggcggccaccacggtattaatgctgacctgatggctctgggcgcagcttcgcaccgacggcaagcggcttcccgcagataaactgccattatctatcgctttggttaacccatctgcaagttgtaaatagcggattttattagtaatagtagacatagtgacaattctccactgtttcgatgggtacagtttaaagtttgctttactgtacccatcagaatagagaacttctggttctgccgccaccgtccattgctggttatgctaattcctttgttttatttcactgaggaatccccatgctggatagcgcatttatcagttatgtcaccgttatgtccatcacgcccggtccgaataatctgctgctggctgcatccggcgtcaatttcggcctgcgaaaaaccgtacctatgatgttaggcgtgaccttcggcagcgcctttcaatgcgcgctgaccacaacgctattggcattggtactaagctgggccacggtgattcgcctgcctttggtgacaatcggttgtgcctatttactttggctatcgtggaagatttatatgtctggcgcaccgggaagccgggaaaaacagcagccaatgagttttattcaggcctcactatttcaggccatcaatcccaaagcctggctgatgagcatcaatgtcgcgattctatttacccctagtcccggagaaatgctcagccacacgctgctactggtgagcgggtttgccttactcaatttgccgtgcgtgggcgtctgggcagtcatgggggataggttgcgtcatgccctcacggtgaactggaaattgcggttatttaacgggttaatggcaggaatgatggcaactaccgccctgtggctattagtcgatgaatggatggcggtctaccaataaaaactcaggaaggcagaatcggcgacagtttagacactttctttaagctgatacgggaaatgaactcggtaatcgacaagaccatcgttgaacgcaaaacctgctgatagcgttggtgttgcatagcaataagagaaggctcggcttcttctggtgtgagaaatgtgggaacgggcggtaacgcggttacacagtgcaactccccaaaggggccgagaatctcatcgtcggtgaaacgatattccgcgccgtcgtggttcatttcttcacgcagcgccattaaaagttcggcatcttcatattcatgacgtgaaatcacgcccaaggcataaaccagcttcaaacgcacagataattcgcccaagggaccgtcaacaattaatagcggttccacggcatacttcaccgcatagtcgtcctttcggaaaacctgcaccactaaaatgtttaaggcttcggccagtagatcaacggcggcgataaggaaacttcggacggttttaccggcgttaagctgttccagaaccctattttcaaatgcctgtgctttttcaatcatctgttatctactacagtggttggttaatggccatcctgcggactttcccccacgcatttcacacggtcgcagccccgcgacaatgcaaaatctactgggttataccccactcactgagataaataccctgttgttaagccgatatttagagcagaaagactcgtccctctgctcttatcatcattaacaagcatccgtggttactgacgcggtatttatctcccgactcaggccgggagggcaaatccgttggcatatcccgtcgtgagccgcttttgccagcttaacgcgccaggttttcctgcatggcgttatacacattcaccgcctgttcgacaacctcgctattcgcaggcaggccagaaacttgcgccagtgcagcttttgcgcctattttatccagtaattcgctccattcctgcgcctgcgggtcctgctcactgcgatagctcattgcggcggcaatacctttcaccagattatcgtgaggcagatgatattccagcgtgcccactaacggtttaatcagacgatcgcccgcgcccagcttacgtaacggctgacggcccactcgttcaacgtcatcatgcaggtaagggttttcaaagcgtgataggattttattgatataggcggcgtgtttttcagggtcgaagccatagcgcttgatcagcactgcgccgctctcttccattgcccctttcacaacctgacgaatttcggcgtcaagaatggcatcgcgaatggtctgtaggccagaaagttgccccagataagcggtaatggcgtggccggtattcaaagtgaacagtttgcgctccacaaacgccatcaggttatcagtcagttccataccggcgatttgcggtggttggcctttaaactgggtttgatcgacaatccactcgctgaaagtttctaccgtcaccgccaacggatcggtgctgccttctgcggaaggaggcacgattcggtctacggctgaatcgacaaaaccgacatgttcttccacccagttcttttcatcttccggcaacgcggcccaaacatgctgcttgaactggctggtgccgcgcaccatattttcacaagcgataatattcagcggctgattattaccggcctgatggcgggcaaccaacccctgcgccacgataccggcaatttttgccaaaacctgcggcccaacggctgtagtgacaatatcggcctcggcaatcagccccacaacttccgggctaccgctatgtaccgcgctgacgtttttcacgtcttcaatgcgcgcctgctcaccgacaaccgtgacctgataggatttacgacgattcagttcatccagcaaaggctggttcacgtcagcaaaggtcacctgagctccggcatcggccaacaatttgccaataaaaccgcggccaatgttacctgcgccaaaatgtaatgctttcatagttttttaccttgaatttgccgttggaaaacgggggccattggagaattccggccccgattcgggctgcgcaatttgctgcgcagccggacaacactcaccgccctcaggcagatttcttaccggagagcaggtctaaaacttcctgcacactttctgttttgctcaggcgcgcgatgacggaatcatcatccagcgcattggtcaggctggtgataacctgaatatgctcgttattacgtgcggcaataccgatgaccagacgcgcaatttcatcttcttcatcgccaaaacgtacgccattcgggtattggcagaacactacgccggtacgtaatacgcggtctttggcttcgatggtgccgtgcggtaccgcgatagattcccctaaataagtggaagtcagtttttcgcgttccagcatggcgtcaacgtattccggctcaacataaccccccttaaccaactgctcacccgcgaagcgaatggcctcttctttggtcgccgcatgcagattcaggaagatgtttgctttacccagcttgaatagttgctcttcagaagcttcaaaactgtcatccagggtttcgatcactttctgcactagcggtgcgctttccgcctctttactggcttccagcaggcgagtcgtcagattggtatacagctggctatcgaggaagttggtcaacgaaatgtgctgtgcctgcggggcgtgacgcattgcccgctcagtcagatctcggtgggtaataaccagatcgacatcttccggcaagttattgattgcacagttagtcacggagatatgcttcaatccggcatcctgtacttttttacgcagaaccccggcacccatcgcgctcgaacccataccggcgtcacaagccacaataattttacgcacggtagtcagatcgcccgcggcggcagcagcgttagccgcctgaacgcctttggactgttgcttcatgtcctgcatgcggcgagtcgcttcttccaaattgtcttcatcatctttaactttggtgtttttcagcaagatggctgagaccacgaaagagacagcgaaagcagcggcaaccgcagcaatgttagcgaagtaagctcctttaggcgtcatcgccaatacggccagaatagagcctggagaagcaggagaaaccagaccgccgttcagcaaagtcaaagtgaacacgccggtcataccgcccaaaatcaccgccaacaacaggcgcggattcatcagtacatacgggaaataaatttcgtgaataccgccgaagaaatggatgatggctgcgccgccagcagattgcttggcattgcctttaccaaagaacatataggccatcagcacacccaaacctgggcctgggttggcttcaatcaggaagaagattgatttgccggtttccgtcgcctgctggatacccagcggagagaagataccgtggttgatagcgttgtttaggaacaggattttcgccggttcgacgaagatagaagccaacggcagcaggttatttttaaccataacatgcacgccagcagccaacattttggacaggatttcgaccagtgggccgatcgccataaaggccagaatagccagtagcatcccgataataccggcagagaagttgttaaccaacatctcaaagccgcttttgattttaccgtcaacccaacggtcaaagcgcttaatagcccaaccgcccaacggacccacgatcatcgagccgaggaacatcggcatatccgcaccgacgatgacgcccatggtggttatagcaccgacgacgccaccgcgttcgccaccaactaagcgaccaccggtataaccgattaataacggcaataaataggtaatcattgggccaacaagcttggctaaagtttcatttggcagccagccagtcggaataaataaagcggtaataataccccaagcgataaatgcgccaatatttggcatgaccatattacttaggaatcggccaaagttttgcactttaaccttaatgtctggtgaaagcataaaaacacccctattggtacgcgctaacaataagagcgcgagataattattaaggcggcactgcgaaatccgccgaattgctgtatgcaatttaaactctagcatgggctgtaatgagggcgtaatccgcaaaatatttgtgatgcagatcaccacaaacaccccaaaatagcgtgctaattagtgatatcagtcacatttatgccaatcaattaagtgaaattagtgcaacaattaatcaccacatggaataaatgtgattaagatcacccttagtcccgtctattttgttttggaaatgtgatgtttatcacaataaatttttcatcaaaaaaggaattagaggcgatgttcgaggggagccagacttattaagccgctttaccagggaggaagtatttaaacgtgaattagtcaaatagccagttgagttaaataatattaattaatcaattgaaatttataaataaaaatataattaaagaatttcttaattcagcaatctcgagccaacggatctaaaattgataattaatgagtaaggctgtcacttttacatttggtgagcttgaaatttacccaaggctaacctagggtttaatcataaagaacaaccgattaagcagtaagatttcatttttataaaaatagatctggccagctaatttaagggtaaatgatgaaaaaatattatcttatctgtggcatcggtatacctatgattcttctcaattctgctctggcggcgaccacaacgggcagcattaatgccacattaacgttgactaacggctgtttggttaacaacagtgcagcaaccagcggcctgacattaggtgtcttaagctttggttcattcaccaccaccggatttaccggtggctcggcaactctttcgggagcttcaggtacgggaagcagcgccatcagcgtgaaatgttcccctggtatcacccctgtgctaaccattaccggcagtaatgcagctccggccaacatacacggcactgtgccgtctaccggcccgcgctatctggtcggtacaaccaacacgactcaggcgattgcctatggtctttatacttcgaattcttttaccacaccgattgtcaacgccactacagtgacgccaaccaccaccggcgatgccacctacggcaacctgtataccttcttcggtaacataaccggcgtaaccggcggcactgacatttacccggatatttacaccgatactatcggcgtacaggtaacttattaacgtctgggagaatggagaggctatgtgccatagaaaatggggttttgcattttttatctatcatagcccagcaatattagtatttttggtctttccggtattggcattgccgacacaatcttttcaggtcggggcaattatttccaatggctgcctgatcagcggcactaataccggcgtatttgggcagattaatttcggaacttaccccggcacgtccaccgctcaggtcaacggtacttatacgcaaagctcgactattactctcgcctgcacgcctggtacccttctcaatatgagtattaacggtggagctaattacacttcgacccgtaatcttaaaatcagcggacaatcctatttagtgccctattcactttataacagtacaaccaatgcggctattccggtcaatagcaacgtcgccgtcacctttagcaatgcgaataatattactttgccaatttatgggctgttaactctgaatggaaataactattcagggctttatacggacaccttaacagtgactttaacctggtaataaatacaatgaaaaaaataaacactctcgctaaaaaatgttataagccatttattttattaattttaaccgggttttccttcaatattttcgcaaccaataatgtgttgatttggcctattgacccggtcattcccgccgatcaaaagtcctctagcctatgggttgaaaataaaggcgatcaggccactatgatgcaggttcgtattctgggctggcagcaaacggcgggcaaagaaggttatctcaatcaacaaaacgttattgccagcccgccaattattcgtattgaagccggtaaaaaacagttaattcgtttaattaaacaggtgaatcctactgcagggcaagagcaggcctaccgcattttgattgatgaaattccgactccaacgctttctgccaaagcgcaggaaggtgcaggcgttaattttcagatgcgttactccattccactcttcgtctacggtgatggattggattacggcaatgtggccgcagacaagaatacccatcaaccacagctaagctggcaattggtggagctacagggaaaaaaaatgctggaagtcaccaatagcggtgcaattcacgcgcgtctgagcgatgtgaaacttcagcaaggcggccaaaatcatcaggtggcagaaggactattaggctatgttctggcgaattccagccaacgctggcctgtcagcgtgagttccgccagctcgctgaccatgcaagtcaataatcaaaaaaacgtcaaactcagcatgaagtaatttaatagggacgatcagaccgcatactgatgaaaaactaccgtaattctcctttttgggggctggttatcattacgacaggtttttctggtttttatactgaagcgcgggcagatgaggtgatgtccgagctgcctccaccgccgagcgcgctatcggccgatggggcgattcagtaccagctggaacttgttattaatcaatatgcaacggggcaggtcgtaccggttgagtttcagcgtgggcattatttggtacagggaaaagatctagaacaggcaggcattatcgccgagcacctgacgttcccaacgactgatatcagtaccaatccgaatattaaactaaaatatgacagcgaaaaccaacgcctgctgctcgatgtccctacccattggctgcctaatcaggcgctatcgaataacatgggaaacccaaaatatcaggctgttagcagcaccggagcgttattcaattacgatatttatgcctcccgctaccaaggtaatagccagttggcggcatggagtgaacaacgcctgttcggtactcaaggctacctgtctaattctggggtgataaagcagacgctggccggtgaatctatcgataataacggcggctacctccgctatgacacccggttttcccacttcgacgaaaccaatgccgttcgctggcaggcaggggatttgatcacagattcactggcctggagcaacagcatccgcgtaggtgggctcagcgtttcccgcgatttttctattcgtcccgatatcattaccttcccattgccgcagttttccggtcaggcggtcgtccccacatccgttgatttatttatcaacggcaatatgaccagcagcaataacgttcgccccggcccttttactctgaccaacgtgccttttatcaacggtgcgggagaagcgacggtcatcaccaatgacgcgttggggcggcagatttcggtctctttgccattttatgtcgccagtaccttgctcaaaccgggtttgtccgattacgcattttctatcggagccatacgtcgtggttatggagtggatagttttaattatggctctgccgccgtgagtggctcttatcgctatggcgtaaccaattatcttactctggagagccacgccgaaggtgcggaatcactcgctttgggtggcgtaggcagcgtgtttaaacttgggaatctcggcgtagttaacgcgtcttacagccagagccaaatgcgtggccagaatggcgatcagataagttggggctatcaatataataccggccttttcaatttaggaactcagcagacataccgcagcgatactttcggtaatttggcaatttacgataatcaggacgccaacagtaccaacagcggcagcaataataacggtgcgatttattcccttagccgccgcagcgcacaatactccgccagtattatgctgaatgaattcggcaatctgggtgccgcctacattgacgtcagcggaagaaatgacgagcggacgcgattgttgaatctctcatggagccgcacgcttttctccggtagcaatctatatatttcagccacgcgagatattggtgctaacggttggtccggcgcagtttcgttggtcattccatttggcgcattatccaataccagtatttccagccaacgtagtattgacggacaggctcgtcagcaggtgagctacagccgcggaatgcctagcgatggcggcctgagctgggatctggcctacgctcatcaatccgatcagaaaaattatcagcaggccagcttgaactggcgcaacgccagctttgaatccagcatcggcgcctatggaaataccggagactacactcaatgggcagatttgagcggctcgttagtattaatggataaatcgctgtttgcgaccaaccgtatcagcgacgcttttgtattggtcaacaccaacaattatcccaatgtgagagtgcgatatgaaaaccaactgattggcgtgaccgatagcggcggccatcttttggtacccagagtcacgtcttattatccggctaaatacgagattgataccaccgacctcccggcgggtatccaaatttccaatacagaaaaacggttttcggtgcagcgaaacagcggctatatgattaatttcgacattaaaaagtcaaactcgctcagtttcgtcgccattgaccaacaggggaaaaatctgcccgtttccagtcgcgtgttgaaaaataatcaaacgcgcacttatgtcggctgggatggcattgtgtatctggaagatctcgaagctagcaatagtttgaaaatcatcaccccagacggtcgtcagtgccaaatcactgtgccttttgacgcttcggcgcctcagccggtcatactcaaaagcccgatagtctgtacacttaatccggctcaggtgaattaaatgaaaaaaatcattggtctcgcggttcttactatcggctcactggtgggcggaatccaaagcgctcaggcggcctgtagcactgcgtcaaccaacggttccttcggtagcgccacctcttttgccgtcaataccacggctagcaatacctcgggttccgttacagtaacctgcgcggctctgagcataggcttgctcactcaagactccatcaccttatcgctggttagctccaccgccgtcaacggcacctatgctgccatgaccgccggtggaaccgatacgatcccggtaacggtctgcgcggccgttcctacagcgacaacctgtgcttctccgctgccgttaaatggcgctagcgtcacttttgccggtgccagcctgatcaatctctctttgactcaaaaacaattcactctaccaatttatatacaaacggtgatcggctcaaacgtagcggcgggaacttatacaaccacgttgggaatcaaaaccagctactcaatctgcaccgcactagtctgtctgggtaccgcaggaaataccaacgggcaaccaatagtaccggtcactgtgaccatcatcgtcactaacgactgcacgacgatcaccgcgccgcccgtcagttttggcactcaacccttgctcagcagctttgcctccgtcagtaaccaggctatcaacgtaatctgtaccaagggcagcatttatactgtcagtctggataatgggcagcacgcggtgagcaatgtgcgctatatgtcgaacggaacctcttctatcgcttacgacatttatcagggtgcaaccagcaaccgttggggcagtctggcggctggtcaaagttggtccagcagcacctccaccagtattagcaccgatttactgacgcgcacttttgcctatacggcaacgatcttaccaggccaaaccacaccgccagccggtacgtataccgataccattatggtttcattgtctttttagctgcatataagggaagtcgagaactggtgcaaagagtcgaggaacgagaagaagggaaagcgaaaaagaacaaagggaaaggcgttataccaaacggagtaaattctgtcaggccaccatcattatggcctgacattcactaaactgattattctagagcagcctgaacgcttttcttcgcggcagccatcgccggatacttagccaccagattggtcatcatggtgttgtactgcacggcctgagcctgagtcgggaactgcacgccaccgttattaaaggtcacctgtgcgccctgctgttgcaggaaatcacccacttgcaccaaatcctgcacgaaggcagcaacggtcggaatagcgggaatcagtgtggcagatggctgagtcaccaacttgtcgtaaacctgattgtaaaccgccttcagatcatccggctgtttcaacgccgcatgggcgctatcggcctgatgcttggcagtttgaatttgttgagtcaataaattgagcgtgcctgccgcttgctgtagcgccgcacgtttattcacgtaatcctgcgccacgcgaatttcatcaatctgagtgacggctggagtaaagcccgcttcgattgatttatttaactgctgcgtaaaggtcactaaaatcgcgtaatcaccagcatagttaccgaatttctgcttttgatcttcgctcagcgttggcagtttcatcccgctgcgcatgacggtattttgcagatagtcgatgaaagccttgcgttgctcaggctctttatcgccacatgcagtgagctggaacaccataaacagcgccaaaattgacgttaaccaacgagaataccttgtcgtattcagtgcaaaagccatgtggaattactcctgtaataagcgtttattttcactagtgtccgttcttattacccatccctgaatcaataagaatagcgcaaagggagaggttttctccccctttgctttgaccgcaggaccgttactgtagcagcgagatatccgctacctgcaagaacagctcacgcaatttacttaacaatgtcagacggttgatacgtacggcatcgtcttcggccatgaccatcacgttatcgaagaaggcatcgacgttttcacgtaacgcagccagttcaaccaatgcttcctgataacgcccttcggcaaacagcggctccagctgatcgcgcagcaccaccagatgcgttgccagctgcaactctgcggtttctttcagtaccgcagcgttcacgcgatcgttcagcgtatcgctagatttcgccagaatattcgatacgcgtttattggccgcagccagcgccgctgccgcttccagagtacggaaatggctaaccgctttcacacgcgcatcaaaatctgccggtttggtcggacgacgagccaacaccgcctgaatggtatcaacgctgtggccttcttcctgataccaggcgcggaaacgacccagcatgaattcaaccacttcatccacaaccttgccgttagtcagcttgctgccatacaggcgcaccgcttcttcggtcagggtttgcagatccaacggcaagttcttctcaacgagaatacgcagtacgcccagtgaagcacgacgcagcgcaaacggatctttatcgccttttggatgctgaccaataccaaagatacctgccagcgtgtccatcttgtcggctatcgccagtgcacaagcgaccgggttagacggcagatcgtcaccggcaaagcgcggttgatactgttcgtttaacgcaacggcaacgtcttcagcttcgccatcgtggcgggcatagtgcattcccatcacgccttgggtatcagtgaattcgaataccatgttggtcatcaaatcacacttggaaagcaagccagcgcgcgtagcatggttaacatccgcaccaatttgttctgctacccaaccggccagagcctgaatacggtcggttttatcacgcagcgtccccaactgctgttggaacagcacggtttccagacgcggcagattatcttccagacgctgtttacggtcagtcttgaagaagaattcggcgtcagccaaacgcgggcgaaccaccttctcattaccggaaatgatttgctgcggatctttagattcgatattggcaacgaagatgaagttaggcagcaatttgcccgcggtgtcatacaccgggaaatatttctgatcccctttcatggtgtaaaccagcgcttccgcaggaacagcgaggaatttctcttcaaacttcgccgtcagaactaccggccattcaaccagcgaagccacttcttccagcaggctttcactcagatcggcaacgccgccaatcttctgcgcagccagctcggcatcacgtttgataatggatttacgcaattcatagtcagcgataactttgccgcgttccagcaggatctgcggatactgatcggcattatcgatggtgaattcggcttcacccataaagcggtggccgcgaatcacgcgatcagaatcaatgcctaacacggtgccagcaatcagctcattccccagcaacagcgtcacggtatgcacgggacgaacgaattgggtttctttatcaccccagcgcatcaatttaggaatcggcagtttgctcagcgcggtattgaccataccggccagtaacagctgcgccgactggcctttaacgtgggcacgatacagcagccattcacctttatccgtagccagacgctcggcctgatccacggtaataccgcaaccgcgcgcccaaccttcggcagccttggttggcttgccttcggcatcgaacgcctgagaaatggcagggccacgtttttcaacttcacgatcggcctgagccgcgctcagattggctactttaaccgctaaacggcgaggagcggcaaaccagctgacgtcaccgtgagataaattggcgttatccagctcggcggtcaggttggcagcaaaagattccgccagggaacgaagagccttcggcggcaattcttccgtgccgatttccaccaggaaagtctgttgagtcatgacagcctcttagttctgattctttttgcacatagggaagccaagggcttcgcgggaagcgtagtacgcctcggcgacagctttggtcagcgtacggatgcgcagaatatagcgttgacgctcggtcacggagatcgctttacgtgcgtccagcaggttaaaagtgtggcctgctttcaaaatgcgctcgtaggccggcaacggcagcggattttccagcgccagcaatgactgggcttctttctcatactgctcgaagcaggagaacaagaaatccacatcggcgtattcgaagttataggttgattgctcaacttcattctgatgataaatatcgccgtaggtggttttacccaatgggccatcgcaccagaccagatcgtatacgctgtccacgccctggatatacatcgccagacgttccagaccgtaagtgatttcacccgtaactggcttgcactccagcccgcccacttgctggaagtaggtaaactgggtgacttccataccattcagccacacttcccagcccagcccccaggcacccagcgttgggttttcccagttatcttcgacgaagcgaatatcgtgaatggtcggatccagacccaactctttcaaagaacccaaatacagttcctgaatgttgtctggtgaaggcttaatgatcacctggaactggtaataatgttgcaggcggttagggttctcaccgtagcgaccatcggtcggacggcgggaaggctgtacataagcagcagcgattggctctgggccaagcgcccgcaggcaggtcattgggtgggaggtacccgcgccgacttccatgtccaatggttgaacaatggtgcagccttggcgcgcccaatattcctgtaacgtcaggatcaggccctgaaaggtcttggtatcaaacttttgcatgttggattcgcacgcgatacaagtggataaaatggaatgaatcagtatacccgctgaccgtaagatatacagccagaatccggcgagatgtgtaaatcagagggggtttgttgattaaatatccagttaaaggacgtgaaataacgtagtaaagcggaaataaccggcgagaaccttaggtaaaataatagaattccgatgaactaatggaatcaatctatgactcgcctgcggaaatagcacggtcagaaccgtatccactgatataaaccgagcgacaagaagtaccggtaagatacggtctgaaactgttaatcacgacaagctctttcaccgccagccccttattttaataaccaatccagcagtgccatgccaacggtgaccacgcgactgaatcggtattctggtcacggcggcgccctatcggagcagcagggatcggttccctagagccatactcgataaaacaatgatctgatttttggtcatcgcacagagatgggtaggtatcacatgaaaatgcccctccgcctaagggataagcggcaagagtatgagagcaaccgaggagcaaccccagcccaaaggtacacactgacgacatccttagaatatttcgcttagatgacataatatacactcctatataattacacattgcaacaataatggtgtttaatgctgcaattgatcaattattaaccaatggttatctgcgtcaagtttctgcccaaatataaaatgagtaggttgcttatcaggcaccgaacggcgattatcctcctgccgagcatctcatagaggaaacagtaagatggctttagaacgctgtggttgggtcactgccgatccgttatatcttgcctatcacgacaaggaatggggaattcctcagcgaaacagtcaggcgctgtttgagatgatctgtctggaaggacaacaagccggcttatcttggattaccgtcttaaaaaagcgtgaaaattaccgaaaagctttccataatttcgatcctcatttggtagccaaaatggggccgaatcaggtggaagcattagtgcaagacagtggcattattcgccatcgcggaaagattcaggccattattaccaatgctcaggcatatctggctatggaggctaacggcgaagatttctccgaatttatttggagttttgtcgataatacgccgaaagttaatcactggtggagcctggcagaagcccctgcaaccacacccgtttcagatgcaatgtccaaggcgctgaaaaagaaaggctttaaatttattggctcaactatctgttatgcctttatgcaagccacaggcttggtgaacgatcatatgtgcaactgtttctgtcatccggataacgccaataaatgatccgtaaggcgaatgctgaagatcataatgcgttgatcgagttatggttaccaagcaccatcgctgctcaccctttcgtgccagagagctactggcgcgaaagccttgatttggtaagcaatacctatattcctcaggctagcaattggctatatgaaacaccgaatggcaccgttggatttatcagtgtactgaacgaacaattgatcggggcgctgtttgttgagcaaaactacgtcggtcaaggcgttggccatgctcttatgcaacatgtgcaaactcgttatcctgcgttaatccttgaggtttaccaaaaaaatcagcgagcctaccgcttttaccgtaagcatgggtttaacgtttcagagcgatcttataatgaagaaacgggaaattatgttttaaccatgcattgggtaaatcatcaaagataaaaataaatattattggctattttcctactaagactattaaattttaattactgactacaattggcctcgccgcaaataaaaaaataaatgttattggataggttaatattcaaacctccaccttataaaaaggcacaatataataaatcatttttatataggcctacactttccgcgtcgatgaaaaacccaagatgataatggaatattatttatataaacattcatatttcattcagaacagcaacttaatggtgctatgactatggtcgataaaactaagcccccgttatttttgttcttgctttcatccactccatccttagccgaagacgggttctatttcgaatagtatatatcaaaatggatgcgtgtatgaaaccccaaataggcaaaatgaataaaacatgcttttattcaaacgattacttcagttggaaaccatgatgtttactccctaatagcaaactggatcagaaatctcccgccgctgatctgggcataaagtctatactgggaccaggttacgctttacaacgttgtcattcatgggcgttataatcaggtcgaaccgcctggcgcggtataaaaaatttttcccggtaaagatatactttgctcaataaacggggaaattgttagcctgagtatgactgactataactgtgataataacgaaattgcagatagaaacagcattgaactcgccctatcattaacgaacccacttttttattggatctacccgcgaaggtactataagaagaagtgaaacgaacggcgcaagttcattctctaaccacatgaaatataaaacaaagagatggaaaggaaaggaaaggaaaggaaaggaaaggaaaaactattttctctggtagtttcaagccatcagaaaaagtgagaattggattcaaatgtgatgaacgacaatattaataaagcaactctaccagcctaatatctctatcacctgcatctttattttttgataaagacacctttagtgattccctgttaataactactcatcatgtatttaaaatcatatttaacttatcaccctatcaggatgacaagttaaattgtttacctagtaataataaagccattttccacaccataaataacaaaacaattaaaagggattaatatgtataagaatatactgattatcatcctgtcttcatttttattaacaggagcgccaagcatagttttatctcaggacttaccgtacacaaataggataaatgatattgggccaatttatgattatgatgaaccaggaattgaaagtggctatacgttaattcaaccggaagagataatttatctggacatcaatgatattttttcacaacactggcaatcaagaaaagaaacctccgtcagtaatccctatctggattgcgatacagactgcacaatattacagaaaaaaattatcccactaaacgaaatttttactcaagccgctattgatccgaaccattccagccagcaagttttattaagttttgccctaaccgaaaccaatgagttcaattttagcattggacaatatctggatatcatcgttgataaaaatagtgtccgtctgcttggcggagctgtgccaaaaggcattgaaacccctcttaatcatcactccaatcagctcacttttcttttccacgttcaagaccagcaactctctatgagttatatggagagcgacagcacgcaacagcgctacctttcaccaacaataaatctggaaataaaaaaatcaaaagaaataaattattggccggatatcgagatattcaaccccaatcctggcaaccctatactagtaaagaaaatactattaactagccagagcactcatagccgctttaaacgcggcatcgccgggaaaataggctgttatctgtctggcccgctggcactctacaatctggtggtgcaagggcattgcactcaggttgaatctgcatggtcgagcataaagtccttctttgccggaaaggacagcaccaaaatgatagtgattgcagggaatcccattccgctaaaaccgacggttaccccaccctctgagcagactgataacctgaatgcattcgaactcagcgttttgaatacccacctgcatcaccaagcgctaacgttgcctgccgcagccgatttctgccatacatcgatagatgaaatcaaaggtgctcgctatccgcgacaaatcagacacacttgcgccaactggctatccgtcgtgttacaggatttcaccctgctattcggcaatagcctgcgtacctggtccgcagagtatctcacccaaacgctaaatggtattttggatcgccaggcaattgataatgataacgacgcccaagatgcttttattcgccaacctgccgctggcgtgcgactcatccaaaccattgcagatattgctgatagagaaggccgagccgaagttattgagcaagttagcggggcatttactcatgcggtacagaattatgccaactatgtgatgactcaaccttcctccggcccctgtactccttcctgtagcgattcaagttcaagtcatagcagctgtagttgttccgattgcgatatagattcgccattagcggctcaggaattgccgctcggtacttatcagttaactctctccgcctatattcctcaacatacgcaaccgctgattttacaaaatggattatgggtagagccagcgcaaggttttgatatcgaaataatccgaggtacttttgctgagactcgccaacaacgatatgaattgatggaaacaatccagctatggcgaaatgcttatatcgaaaaaagagtgtattgcaataaatacgggaatttccccacgcaaatagatacggcacgcttcgccgggcagtccaccagcactctgctgcgcagtaccttgcggtactttgacgaaaataacctgattgcagtagtccgatttaataaccaaattattaatgtgagcgcggtatctcgtttttctgatcccgatgaagacgcaagcatcatacaagcgaatattattgctacgttgactcacccggcctacgttttaacccccaataatgaaggtaccgttcgccgcgctggcacggctgctctgcatcaacttattcagcaactgattgccgatggcgttcaaacgcttagttcacatgtcatttcaacgccttccgctattgtgaaaaagcgccttggcttcagttttatccctgacaaaccccatagcatcacgccaacacctaatagcgatctttagccaccggctctccgccctgataatttcttattctgggcggacaaccatttcaatatttgatcaacagacttttcgtgcgctctttgacgataaaccggccaaaaaaccacattgcgcggcactatcagagttttctcaatagtattctgcgacgttttaccggataacgatgcccatcattttcagcttccgaacccttagcgggagcttgcttcaggttttagcgacggtggataatttctttacgaaatccacgttgataaacacatttaaggacatcacatgcaaaaacgcacacttgccattgttgctgcactctgcgcaactttgactctttcggcctgtaccactaacccttataccggcgaatctcaagctggaaagtctggctacggtgccggtatcggagccttagtgggcgctggcgtgggggttttatcttcctccaaaaaagatcgcggcaaaggcgcactgattggcgcagcggcaggcgcagcactgggtggtggtgccggttactacatggatgttcaggaagccaaactgcgtgacaaaatgcgtggaaccggcgtaagtgtcactcgtcagggtgacaatatcgtactgaatatgccaaataacgttaccttcgacactgatagcagtaatttgaaaccagcaggtgccaataccctgactggcgtggctatggtattgaaggagtacgaaaaaacggcggtcaatgttatcggttataccgatagtaccggcgctcgcgctcacaatatgaagttgtcccagcaacgtgccgacagcgtaggcagcgcattgatcactcagggcgtagcggctaaccgtattcgtaccattggcgcaggcccggataacccagtggcaaccaatagcactgcggcgggtaaagcacaaaaccgtcgagtcgagatcacacttagcccgctgtaaatgacaaaaagggtgacggctcatcactttctggccgtccccccttcacccccaaatctttctcgccccagaacatccccgataaacaccgccaccgcgcaaagataatctatatcactaccctatggatttcactttgtggcaaggcggcaaccgaaagagtcgccaagagcttagtccaccaagtgactcgggcgagtgagggaagccaacaccgccacggcgtgaaagatgacgggtatttgtgataatctgccgccagttacccttccaggactaaaccgtgagcagtacgaaaggaccgcgcccatctgggcgagcaaccatcaatgatgtcgctaagagtgctaaaactggcaagactagcgtctctcgctatttgaatggcgaacataacctgctgtccgatcgattaaaactgcgtattgaagaagctatcgccaaactaaattatcgacctagtcaggttgcccgcagcctgaaaagggggcgaacccgattgatcggcctgattttggcggatatcaccaacccttattctattgacgttatgcgtggtattgaagccgcttgccgtgctcatggctttaccctgctgatgtgcaataccaacaatcaggtcgaacaagagcagcattatctgcaactgttgggcagttatcaggtggaagggattgtggttaatgccgttggaatgcgggaagaggcgctgtcgatgctgcaacagtcgcgcctgccgatggtgttgatcgataggaagatcgccggtttctcctgcgacatgattggcttgaataatgccgaagcggcaatcatggctaccaatcatttagtcgagcaaaactatcagtctattttatttcttagcgagcctttggggctggtcaatacccgccgagatcgtctgatggcgttcaaagcagcgatggcggtgcatcctgagcgagcgtcggaacacgctgaagtcacgctggaagatagtcagcgaatcaataacattgtcgaccagttcaaccagaaacatggggataaacgccgtgccattttagtggccaacggcagcctaacgctgcaactggcacgcaccttacgccacaataatattcagtggggcatcgatattggcctgctcggatttgatgagttaccttgggcggaactggctggcgtagggattaccacacttaagcagcctacttatcaaataggttacgccgcactcgaacaattagtgaaacgcatgcaggggagtgatgaacctccggctgatatcatgttttctggcgaactggtgatacgcggctcgacacagctttagtccgtcacttttggctcgtcacaattcgataaacacagcggcgggagccagataaaatatgctcagtacgctcaaccggtacttgtaaagcctgctggaaaacctctaactccgcgcgacaaaagccctgacaactggtcgcagcggcgcaaatcgggcaatggttttcaatcagtaagatagagccatcttcctgcatttcccattcggccatatagccttcgcgcgtacgaatagccaccaggcgctccacccgttcaccaatattactggctcctttcatagcctgaaagtattgatcgcgggtttcctgttcgcgggtatcaatcagcaaattaagggcatcttcacctaacttagtgcgaaccatacgcagtaattgcacggttaattcgccgtgagcatcgggaaatcgcgcgtggccagcatcggttaattgccatagttgaatcggccgtccgacgcctttagcctgtgcgaccgcaatcaccagaccttctttggccagcttgacgaactgctgacgcgccgcttccccggtggttccaaggatcttgcccgcatccgttgcctgtagtgggccgcgggttttcagcagcatcagcaagcgctcggagacggattgcgtgcttattaccccatggtcggtggtattcatattactcccgatattaaaaacacattggcatttaccaagcatatacttgacttattaaccctgcacggccacagttattccaagttaacgcttgtttaactcagtctatcatcaaatcttactcaacaaccagtcgtactggttaggataaccactgtgctaatgaatgatgcgagccgctggagcgatctattctccggggaaaatgcggtttttgcctttgcgctgtcggcgggtgtcgcgttacacgccattaatatttatatcgtgacaaccattctaccttcagtggtgctggatattggcgggcttaatctctatgcctggaataccacgctctttgttactacgtcgattcttggctcggcgctctccgctcgcctgttaagtcgctatggcccacgcgcggcctatagcttagccgcttcggcctttatgctcggcagcctgctgtgcgctattgcgccaactatgccgatgatgctggtaggccgcgcagttcaaggacttggcggcggttttctgttcgctctctcctacgccatgatcaatctggtcttcccgcaatctctatggccacgggcgatggcgctaatttccggaatgtggggcgtagctacgttgattggcccggcaataggcggcgtgtttgcggaaatgggggcctggcgtttagcgttttggctattgctgccggctacactgctgtttgcaatattcacctggagaattctaccggcgggaacaaaacgtaccgaaccgtcctcatccctaccgataatccaactgatactgttgacgactattgtactaaccgtttccgccagcagtattgccaccgatttgcgctatagcgctgcaggcattaccgtcgctgccctgctactcacattgatgatccgcatcgagcgccgctccaccattcgtttattaccgcagggcgcactgcgtctaggttcgccgttagcggctttgtacatcactatgtcgttactggcgcttaccataaccagtgagatttttgtgccctacttcttacagactcttcatggccaatcgccgctggtttccggctatctggccgccacaatggccgcaggctggacagtggcggaagtactgagctctggctggaagaaaaacgggataagcttggcaattattagcgggccaattatcgttttactggggttgatcgctctggcgattttgctcccacacagatctgtcggcgattggctaaccctcgcccctatcgctctcgctctgacgttggtcggttttggcaccggctttggctggccgcatttgcttacgcgcattctacaggtcgcagcggatgaagataaagacatagccggtgcctctattactatggtgcagatgtttgctaccgctctgggcgccgcgctggcaggtttggtagctaatatttctggtttaaacgatcccggtggcgttgccggtgcagccaataccgcatattggctattcgctctatttgccatcgcgccgctactggcgattttcaccgcaatccgctgtgcggccattcgtcagccgaccgcgactcttgccacatccgaactgcactaactcatagcccgtagacgctggtcatacccagacagccattactccttgatctctagggggcaatggctgttatgctggctgagcttgaaacttacttattcttagttagccggagtgtgtaatgaagccttctgtcgtgttgtataagcccctccctgccgaactgcgccaacgtttagagcaacattttaccctacactgctttgacggcctgacatcggaaaactcgcaaccattcctttcagcattggcaaacgccgaaggcattattggttctggtggcaaaatcgacccggattttctcgataaagccccacgcctacgcgccgcctccacgatttctgttggctatgacaatttcgacgtcgaggcactcaatcagcggggcatcgtcttgacgcacactccaaccgtgctaaccgaaaccgttgccgataccatcatggcgctggttctggctaccgctcgacgggtagtggaagttgctgaacgggttaaagccggcgaatggcaggataatattgattccagctggtttggcgtcgatgtacaccataaaaccataggtatcttgggcatgggtcgtattggtctggcagttgctcagcgcgctcatttcggttttagtatgcctgtgctctataccagccgtcggtcccatgcagaagccgaatcacgctttaacgcccatcgttgcgatctggatactttactcgctgaatcagatttcttgtgcatcaccctgcctttaacagaacagacgttccatatgattgggccggaacaattggcaaaaatgaagtcaagcgccattctgattaacgcggggcgcggttcggtagtcgatgaacaagcactgatagacgctctgcaaaacggtactattcacgccgcagggctggacgtttttgagcaagaaccgctgtcacaaaactcgccgctgctgaagctcaataacgttgttgccctaccgcatattggctccgctactcacgaaactcgctacgccatggccgcctgcgccgtagataatttgatcgccgcgttaaccggcacggtgactgaaaactgcgttaacccactcgttattgaaaaatagccaagagagatagccgctacccaaataacgtcaatcaaccgaaatggcctataattgcttataggtcagtcggttattttgacgactgatgataagaaagccccctcatccagccttctcctccctgaaaaaacaatatgaggatgaggctatttttccaccggctgacacacttaactcgcctcaaaccctacaaaatcaaacgatcaggaaggcgcgtcatgaaacgtctcacactgcccttattgttagtattttctcccgcagccctagccacctggacgttgcagggcttccctgcattttccgagcaaagcaacggtattttcagcagcgcggcctcgctaactaaaggccaatatccgcttaaattttatcaggataagcaatgctggcagccaactgataccgtcaaactcaatcaaaccttttctctacaggcttgtgataatcagcctgaaatcatgtggcgactatttcgagatggtcagtatcaggcacgtatagatacccgcagcggtacgccaacgctgacgctgagcttaaaacagcccgttgttgatgaatcccaagccgttacccatatttgccagcgctggaacggtcaacccgtaaccgtagacgtcagccagacctttgccgaaggggaaaaactgcgtgatttctattcgggccaaaccgttatcgtcgcaaacggcaaaatcacgctgcaaccggcagagcaaagcggcggcctgttgttgctagaactcgcgcaaactcaagggcctgctccatttagctggcaaaacgccacggtttactttgcattgaccgatcgttttaacaacggcaatcctgccaatgaccatagttatggccgcagaaacgatggcatgcaggagatcggcactttccacggcggcgatttggccggattaactcagaagctggattatttacagcagcttggcgtaaacgcgctgtggattagctcaccgctggagcaaattcacggctgggttggcggcggcaccaagggagatttcccgcactacgcctaccacggctattacgcgctcgattggacccggctcgatgccaatatgggtgatgaacaggacttacgccaactggtggatcaagctcatcagcgcggcatccgcataatatttgatgtagtgatgaatcatgtgggttacgccactctggcagatatgcagagcggccaatttggctcactgtatttatccgcagaacaggcggagaaaacgctgggcaagcactggaccgactggaagccaggcagcggccaaaattggcatagtttcaacgattttattaatttcagtgataaatccagttgggataactggtggggtaaaaactgggttcgcaccgatatcggcgattatgactcacccggttttaccgatctgacgatgtcactggctttcctcccggacatcaaaaccgaatccacacaggccagcggtttgccgctgttttatcgccataaatccgatacggcagccagagaaattcccgcagctacgcctcgggattaccttactcattggttaagcacatgggttcgagattatggcattgatggatttcgagtcgacacggccaaacacgtagaaaaagcggcttggctgcagctcaaacaacaggctacgtcagcattagcagaatggaaaactgctcatcccgatcgggcgctggatgatgctccattttggatgaccggcgaggcttgggggcatggcgtaatgaaaagcgattattatcagaatggttttgatgccatgattaattttgattttcaggatcaggctaaacaggcgctggactgtttctcaaccattgacagcacatatagccaaatggctgaaaaattgcagaattttaacgtactgagctacctttcctctcacgatactcgccttttctttcgcgatgatgcggctcaatcattagcaaaacagcggcgcgccggagatttgctgctgctggctccgggagcgattcagatcttctatggtgatgaaagtggccgagaatttggcccaaccggctccgacccgctgcaaggcactcgctcggatatgaactggaatgaactgaacggctcgaaaggagcgctgctggctcactggcaaaaaatcagccagttccgcgcgcgtcatcccgcgattggttccgggatacaacagtcacaacaaactgctgattattatgcgtttagccgtcagcatttagacgataaagtccttattgtctggacgggggataaaaaacagtaaaccagactattatcctgacatatcgagttttattgatatatctgcgcacaaggtagaattatgggtacgttgcacccgcaattatctggctgtatggtgctcctttacctccgataacaattagtcagcatttatgaagttttcactttttggcgataagtttacccgctacgcgggcattacacggttgatggatgacctgaatgaaggattacgcacgccgggcgctatcatgcttggcggtggcaatccggctcaaattcctgagatggatgcctacttccggcggctatgtcaggagatgctggataaaggacagctcacagaggcgctatgtaactacgatggcccgcagggtaagaatctgctgctaaacgcgctggcaaaaatgctgagtgatgagttaggttggcaggtcgaaccacagaatattgcactaacaaacggtagccaaagcgcgtttttctacttattcaatttattcgctggccgccacgccgacggatcgctgcgtcgggtattattcccgctggcacctgaatatttaggctacgccgatgccggtttggatgaagggctgtttgtttcgactaaaccgaatattgagctactgccggaaggccagttcaaatatcacgtcgacttcgatcacctaaagattaccgatgatatcgggctgatttgtgtctctcgaccgactaatccgaccggaaacgtcattacagatgaagaattaattcgtttggatgctctggcacagcagcatgatgtgccgctactgatcgataacgcctacggcgtgcctttccccggtattatttttagcgacgcaacccccctgtggaacccgaatattattctgtgcatgagtctgtcaaagcttggcctgccgggttctcgctgtggcatcgttgtcgccgatgaaaaagtgatttccgccattacgaatatgaatggcattatcagcctgtctccgggcagcatggggccagcgatagcggcagaaatgattcaacgcggcgatctgctagacttatccaacaatgtaattcgtccgttctattctcaacgcgtgcagcatactcttgaaattattcggcgttatcttcccgccgaacgctgtctgattcataagccggaaggcgcgattttcctatggttatggtttaaagacctgccgattaccacggaaatactctatcaacgcctgaagaaacgcggcgtattgatggtacccggccactacttcttccccggtttggaacatgattggcctcatactcatcagtgtatgcggatgaactacgtgccagacccagaacagatcgaaaaaggtgtcgcgattctggcagaagaagtggaattggcttatcaggaagcgcgctaacaacgatgaagcgcggagagaaataaggcgatgttcgctatcggtatagtgagcagcaatcaatatagtaaacactggcatagcaaaactgcgctaggtggctgaataacttaacttctctctcaaaccccaaagaacaacctcggttgtcctttggggtatttagcgacctaaaagcgctacaacgtccagaacagtacggccagtatctgcggagacataatccttaggaacattgctagcggatacacggtggcataagacagcgccgcagcaccactggttgggtgtaagccattggcgaaagccagcgccggaggatcggtcatagaacccgccaacatgccgcatagcgtcaggtaattcattttagtgagaattcgcgccagaatcccgacggttagcaggggaatcgcggtaatcatcgcgccatagccaatccacgccagcccatcgccataaagcagcgtattaataaaatcaccgcctgatttcagcccaaccaccgacaggaaaaggactatacctagctcacgcagcgccagattagcgctaggcggcataaaccagtacagtttaccgatgctaccgatacgccctaaaatcaatgcgataaccagtgggccacctgccaatcccaagcgtaaagccgcaggaaaaccgggaacaaacagcggtattgaccccagtaacacccctaatcctacgccgataaataccggcaacatttgtacttgttgcagtttttgttgagcgttacctataaccgcagcgaccgcctcaatggattccggtcgccctaccagatttaaaatatcaccgaattgcaggctggcgttgttgctggcgactagctcgataccggctcggtttaaccgagtaatagcgacgtcgtatttctgtttcaggtttaaatcgcgaatttttttgcctaaaacagcctcgttggtcaccaccatccgtgccgattgcagcgcgctgccggcggtggaaagcgccacatccacctcttcaccaagcactaaacgcactttttccagatattcgcgctgtccaactaaatgcaggtaatcgcctaactcaattaaggtagcaggcagcggtaccatcaataaatcaccgcgtttcaggcgagagcacaccacatcatcgctatttaacagcggaatatcctgcatcgccaagccatccaaattaggattgcgtaccgcgacgttcatggtttgcagcagttcacggttttgtccgctcctgctatcaaaatctttagcttcacgatcgacatttatcttaaatcctagccggatcagccacataaccaacagaatcccgcagataccaaaaggataggccatggcatatcccatccccatttgcccaaccaactgaggagaagatcctaaatccgtcaatacctgctgagccgcgcccagcgccggagtgttggtaactgcaccggaaaaaataccgagaatgatcggtagaggcacgttgaaaagtttgtggataaccgccgttaccagacaacccatcactaccattaatatggcgaaagcattcaggcgcagtccggaaactcgtagagaagagaaaaaccccggcccaacctgaataccaatggtataaacgaacagaatcaggccaaactcctgaataaagtgaagcatgtcaccgttgagactgacctgataagtttgggcgaaatgaccaacaataattccgccaaataatactccaccaatccctaacccaacgccatatatcttccaattaccgatccataaccccaatacggcgaccagcgccaacatactgacggtaagggcgatatcagtcataaatcacttccttgcctaagtttaaaatccggtcaaccgacctcggtcttaaattcttacaattagtagggattctggcagaagggcaacgaagggactgtgggatgcaccacaaaatgcgccggataacaggaatgtttccggcgccaaaagctagggaggagggttttactttttttattatctgcaccggctcccggaagggagaccggtgcgagttgggtcactgcaaattactgctgaacggtttctgcgttatccaatgccgggcgatcttctaccggacgaccgatagtaatacgctgtggctggagtgcttcaggaacctgacgcagcaagtcgatatgcagcaggccgttttcaaactgcgcgttatcgacgttcaggtgctctgccagagtgaaggtcagattaaactctttacgaatcagaccctgatgcagatattccacctgtttctccacgggtgctggcttaccacgaaccgtcaagcgagggccttcaacttcgatctccagttcactttgcttgaacccagccagcgccagagagatacggtagtggttatcatcacttttttcgatgttatatggagggaacccctgtgcctcggtagaaccctgcatagtgctcgccaatttatcaaaaccaatccactgacgaagcagaggtgacaaatcataattacgcatagtgttaactccttctttgaagcgaggtaataggctgccacggccgcgttaataactttttttttcaaatcaaagtctgctgttaaataacaaacaggcgttattaacccgtgacaagttggcccccgattacggcagaccaaactcttgattaataatgtgcctaatgcacattatttaaattttatttaatctcaatccgacgaggtttcatactttcaggaacaattcgttccagatcgatatacagcaggccattctctaaattggcgcctttaattttaatgtgttcagccaattggaatttgcgttcaaagtttcgttccgcgatcccttgatataaataagtgcgctgtgctggagcttctacgtgagaaccacggacaatcaacaggttgtcctgagtgactatctccagttcctgctcggcaaaaccggcaacggcgatagcaatacggtagttattttcatctaccagctcgacattatacggaggatagccgccgttattctggctctgaccagtttctaataagttaaacagacgatcaaaaccaatagcagagcggtataatggagcaagatctgaattacgcataacaactgcctcctaaattcattagcaaggttaaataggtcttccttaatggacagactcttggccagaataccctgacggcatattctctctcggcctgataataagatgggatcgaattttttcatttcaactgtcaaaatgaaaaaattttttttaactaaagatttttgctctaaaaacagagttatcgcatacactgaattgggagcgccgccacatctgcgtgtaattattatattaaagcgacagcaaaatgttataactctgagagatcgcttttatgttggctgacaacctgaacactgccaaatgagatgtaacgatatgataagagctaccgttcttcctatggtcactggctgtaccctgctgtttaccagcggctgttccagcattatgactcacaccagtagcagtcagggctactattccggcacccaggctaacgtcgccatgctcaaggatgacaacaccggctgggcgttgcgcccgctgctagccgttgatttacccttttctgccgtaatggacacgctatttctgccttacgattatctgcgttcagataacgaccctgcgcccggctcgccccgagaacgtatccgtcaggaagaagcgcaaaatatggccgccagcgctcaccccattcagtgaatttattatttatcgattaatataggacttaccggttaatgatcaattagccggcttcaaccacaaaaatctgcgaccaaccgtcgacctcccgcatataggcaactttcgtcccatcaggggaaaagaccaccgcgtctcccaatggggggaccgcggttcgctgagttagccgctgaacctggccgctgccaatttcgcaacacaccacactgttatctctgacaaaagcaattctgtcgcccttaggactccaactgaaagccgattgcacgccgtgcccgccatgagtcaattgccgtgattcgccgcccagcggagaaaccagataaagctgtacgattcccgcatcatccctcatcaaacaggcaatggcgctaccgtccggggaggagcgtaaccagtggcgtggcgtgatcgccagccctggatatctgcgtttttccgtataagtcaaccgccgttgatttacccccaacggaggcgctggaagacggtattcatctccctccaaggggctcgaacctgctcgggcgaattctcggtttttttccggtaaatcaacaataaagacttcaggcagtttagaaccatccgccgcgaccgtatcgccaataaacgccagcgcccagcgttgtcggctgccgtcggctttcaagtagccctgtttgccaatccagccttcttcataagcgcggttgatttcatcactccctggccggggcattgacgtggtacggctgaccagaacgcagaaatggctgccatcatattcacgaggatgatgctttggcggattaaccccatgcaacggcacggcaacgccgacgttacgtaaatccagcgcgggatcgcgttcatgcagcacatggtcgttataggtaaaactcagacgcgagccgtcggggctaaaaacgtggacatgagtcccgccacgcaaagcgccgggagtataaggcgcagtgatatccatagcgtccaacgtaatggccaactcccgatccggctcgctgacaatcacaccgcgccgatgatgaaaatcataatgccattggctatccggatgttccgggccgtggataaatacgtagcgagagggattatcagggctggcggtcactacaccaacgtgagcgccgtgctgagcacgataaataacctcaatcactcccgtattacaattgactctttcaatagttaaaccggtgaaagaagccccgtttggccggacgtcatataccagccactggctgtccgccgtccagacattgatattggtgagctgatgacctcgaggatcgaaagttaactgtttttcctgatggctcatatcgcttctcgctgataacccgtatagcgctcatcctgccccattcgccgcactccgtcatccgcgatataccatccgcgcgacccaacgggcgatttattcaccttcgtcgcttccaatttagaatttaatgtctaatatagaatttaaagtacaaatagattgagtataaatagagatacctatgctgagccgctatcacaccattgccgatgctatcgcgatcctttttgccccctatgccgaagtcgctattcacgatatggccagtcagacgctggtttatatcgccaataactattcacatcgtcaattgggagaggattccaatttaagcgagctggcgttcgaccaaagtgcaaagctgctgggaccttatcaaaaacgcaattgggatggtcgtcagcttcgttcaattagctcggtgctgcgggacgatgacgggaaaattatcgggttactgtgtatcaatctggatattaccgtgtttgaaaacgccaaaatggcgttggatatattcctcaataacagcgggttacagcctcaacctgcagttttatttcaggatgactggcaggaacgtatcaatacttttattcaccagtggttgcagcaacagcagctttctctctcaacgctgaataatcctagccgccgcgccttagttgaagcgctttatcagcacggcggatttaaaggcaaaaatgccgcgggctatgtagcgaaaatcctcggaattggcagagcaacggtttacaactacctaaaaaataataaggaatccctatgagttcgctatttgatgccattcaggaagcccatcagattctgcgtccgcaggtacgcattacgccactggattacagtccgttgctctcgcagcacactggttgtgaggtttatctcaaatgcgatcatcttcagcacaccggttcctttaaatttcgtggtgccagtaacaaactgcgcctactgagcgaagaacaacgccagcgcggcgtgatcgccgcctctaccggcaatcacggtcagggcgtggcgctagccgcaaaactgctgggcgtcgaagccactatttatgccccagaacaggctgcagccatcaaattagacgccattcgcgcgctgggcggaaaaatcgagctggtagccggtgatgccttaaatgcagaactggccggagccaaggcggctcaggaacaggggaaagcctatatttccccctacaacgacgagcaagttatcgccggacaaggcacctgcggcatggaaatcgtcgaacagcagccgaatctggacgcggtttttgtttccgttggcggtggcggctatatcgccggaatcgcaaccgtattgaagaagttgtcgccaaatacgcggattatcgcctgttggccagcgaatgccaccagcatgtatagcaatctgctagccggcgaaatctatgaagtggaagagcaggaaacgttgtctgacggcaccgctggcggcgtagaaactggcgcgataactttcccgctatgtcaaaaactgatcgacgataaagtactggttaccgaagaagagatcagacaagccatgcagttaattgcccgcagcgaccgctggatgattgaaggggcggcgggcgtggcgctggcggcagcattgcaacaggcaccacaatggcaaggcaaaaaagtggcggttgtactgtgtggtaaaaatatcgtactggaaaagtaccttaaggccgtttcctgatgcttatcctcaataaacagcaaatactcgacagtttcgccgccgatcgtaccactttactgctaaaacaaggatttatcgcgttcagccagcagcaggttcagatgccggcggtacagcatttgttattcacacaggctaatggcgattgctgtatcaaaagtggctatctggaaggagacgacagttttgtcgtgaaagtttccagcggattttacaccaatccatcattaggattatccagcaatcaaggtttgatgatggccttctcggccaaaaccggtgagccacaggcgctattaatggatgaaggctggctaaccgctctgcgcaccgcattagccggtcgaattgttgccgaactttgtgccccaaaacacattacagctattggcattgtgggcaccggcttacaggctcgcttacagttggtgcacctgaaggccgtaattaattgtcgggatgtctgggtttggggacgaaatcctgaagcattatacgattatcagttatttgctgaatcagaaggttttcgcgtacagatcacgcaaaatgccagccagttagcggaaaagtgtcaatttatcgtgacgactacgccgagccgcgaacctattttgcgggctaaagacattcaacccggtactcacatcaccgcagtcggcgctgatgctactggcaaacaagagttggaaatccaacttgtggccaaagcagataagattctggtggattcattggcgcaatgccgcgcattcggtgagatttcccatgcttttcagcagcagttacttcaggcaacacccattagcgagatcggtgaagtattggcgctaaataaacccgttagagaaaatgatcgtcaaatcacgctggcagatttaactggcttgggcattcaggatgtacagatcgtaaaaagcattctgctttcctgcccctgagcctcagaacaggaaggggccactaatggcccctaaagcgttttttacgttatttagcagcaaattaacgttgattcagcacaaacttttcaatggctagcgctacgccatcttcttcattagttgccgtcacgtactgggcaatctcttttagctcgggaatagcattccccatcgccacgcccaggccagcatattcaatcatcgcgtaatcattactctgatcgcctaaagtcatcacattttcctgtgcgatgcctagatgctccgccagcattttaacaccggcacctttatcaacgcgtttacttagaatttccaggaagtaaggcgagcttttcataatagtgaacttctcgaacacttcggcaggaatctgtgcgatggcgcgatccaaaagctctggttcatcgatcatcatcactttagggaaacgcattgttgggtccatttcactgacactacggtatttcaacgaaattcccgtcagaacagtttcgtgaatggtgtacttactgatgtctttgttagcggtatacaacgtattgtaatcaaaagcgtggaaatgcacgcctaactgccgcgccagagcttcgaaataaagataatcatcaaagcttaaggtttcctgcaacacacattcaccggtcgcggctttttgaactaatgcaccgttattgctaatgcaataatcgttgctgttttccatattcagttcgcgcagatattgagtgacaccgatataaggccggccggtagccagtaccaccaccacgccttttttctgtgcggcctcgatggcctgctttactctaggggtaatttggtgaagcccgttaagcagcgtaccgtccatatcaatcgcaatcaattcaatagccatgacaccctcatatatttacatcgtcttgcatcatgctaacgcgattcagcgaacgaatgctagcaagggtttactcaaccgcctgcttgcctatgaaacctggctcgaagcagcaatattggctgcaaatcgcgcctaaactggcttttcaggcaaaaaaaaaccagagacagtcgcctgctccggttttcttattgccgcaatttatcagatatcgatatttgctgcttttaaggcgttttcttcgataaaggcacggcgtggttccactgcatcacccatcagagtggtaaacagttggtctgcggcaatggcatctttcaccattacgcgtagcatacggcgactttctgggtccatagtggtttcccaaagttgatccgggttcatttcccccagacctttataacgctgaattgccagaccacggcgggattctttcaccagccaatccaatgcttcttcgaagctatcgaccgcgaaacgacgctcgccgcgctcaacgtacgcaccttcttcgatcaggccacgcagtttctcacccagcgtacaaatcttgcgatattcaccgccgtgaatgaattcgaagtccagatcgtaatcggtatcaaccccgtgggtacgaatgcgcagaatcggctcaaacatctgacgctcacggttttcacgaacgatcgagctgtagctgctaccgtgctgttcattttcattcagcaagttcaccagagaatcgatccactgctgtaccgcttctttattgtctaaatcgtcttccaacagcgttggctgataaatcaggttattcagcagcgcacgcggataacggcgctccatgcgagtaatggttttctgcacgctgtagtgttcagcaaccagtttctccaatggttcgccagacattgctggtgcattagcgttgatatgcagagccgcgccatccaatgccagagacatttgatattgctccatcgcatcatcatctttgatgtactgctcctgcttgcctttcttcactttatacagcggcggctgagcaataaacacatggccacgctcaataatttccggcatctgacgatagaagaaggtcaatagcaacgtacggatgtgagaaccatcgacgtcggcatcggtcatgataatgatgctgtgatagcgcagtttgtccgggttatattcatcccggccaatcccgcagcccagcgcagtaatcaaggtagcgacttcctgcgaagacagcatcttatcgaaacgcgctttctcaacgttaagaatcttacctttcagcggcagaatcgcctgattcttacggttacggccttgtttagccgaaccgcccgctgagtccccttccactaagtagagttcggacagcgccggatcgcgttcctgacagtctgccaatttgcccggcagaccggccaaatccaacgcgcctttacggcgagtcatttcacgagctttacgcgctgcttcgcgagcacgagcggcatcaatgattttaccgaccacgattttggcgtcggttgggttttccaacagatattcgaccagcttctcattcatcagcgtttcaaccgcggttttcacttcggaagaaaccagcttgtctttggtctgagaggagaacttaggatcgggaacttttaccgaaactacggcgatcaggccttcacgagcatcgtcgccggtagcgctgattttcgcttttttgctgtagccttctttatccatatagctgttcagggtacgggtcatcgccgtacggaaaccaaccaaatgggtaccgccatcccgctgaggaatgttgttggtaaagcagtagatgttttcctggaaaccatcgttccactgcaacgccacttccacgccaatatcgtcttttaccgtagagaaataaaagacttttgggtgaatcgggtttttgttcttgttcaggtactcgacaaacgccttgatcccaccttcgtaatggaagtggtcttctttatcgttacgcttatctttcaacttaatggaaacgcctgagttcaggaatgacagctcgcgcaggcgtttcgccagaatttcatactggaattcagtattattggtaaaggtctggaaactcggccagaaacgtaccatggtgccggtttgttcggtttcaccgacaactttcagcggcccctgtggctcacccattttataagtttgctcgtgaactttaccttcacgacgaatgaccaattccaatttttcagaaagggcgttgacaaccgaaaccccaacgccgtgcagaccaccagacactttataggagttatcatcaaacttaccgccggcgtgaagcacggtcatgatgacctctgccgcggaaaccccttcttcttcatgcagaccggtaggaataccacggccgtcatcctgtacggatacggagttatcggcgtgaatagtcacctgaatttctttacagtgacccgcgagggcttcgtcgatagcgttgtccacaacctcgaataccatgtggtgcagaccggtaccgtcatcagtatcaccgatatacatgcccggacgcttacgaaccgcatccagcccttttaataccttgatacttgaggagtcataagtattcgacatcaacgtttctcgctcatctttaatcctgtggttgaacctctattttgccatgttccactcggaacatcttgcccttttcacctaccatgtcggttacttgttcagcgctaaccgcactgacaaaaacctgtgcctgggtggctttcaaacgctcagccaataaacggcgtcggccggtgtccagttcagaagcaaaatcgtcaagcagatacaggcaacgccgcccgctctgtcgggtgagaaactcaccctgcgctaaccgcagcgcgcacatcagcagttttagctgaccgcgcgatagcaaatcttctaccggcgtaccctcggcccgaatgcggaaatccgctttatgcgggccgacggcggtataggttagcgctctgtcacgctcaaactggcgttccagcaactcaccgtagtcgctctctttgtcccagccacgctggaaagagaaactcagggcgaactctggcaggaacagggcgcatgtcgcagcaatatctgcggcaatggcgtcactgtatgccgctcgccattcgctaatacgctcagccagcgggataatttcctgatcccaaggccgtatttgcgcatagcgattcacctggcgcagcgcggcgttgcgctgcttaagtaaccttttcaggttgctccaggcagtaaagaaaccgggttcattatgaaagcaaccccagtctaaaaaagcgcgccgaaacttcggcccgccgttcaataaggtaaaaccttctggcgtgatcagctgcattggcaacatttgcgccagctcagccactttatggccgtcactgccatcaatccgcactttactttcgccctggcgactcttgcttaacccaacggacaactcacgctcaccgccgtctacccgcccatgtaatacaaactcaggacagtcatggcgaatcactcttcctgcctgtaggctacgaaaagccctaccatgaccaagggtatatactgcttcgagtacgctggttttgccgctgccattggggccgacgagaaaattaaatcccgcggccggtgccagatctgcagattcgatattacgaaaatcttttatcagtaaacgcgtcaaagccatgaagctggttcttattcttatgatcgaggacgtcattatcgccggcagactggatgtgagcagagttcagcctcatccatgcaggcaaatagacagcccgataaatactacaaacgcattggcatgactacgtaagccgccgcctgactcgcgctatcttcaatctgtacgcttgaagtcgaatccgttagcaataggcgaacatcttcacatttcaaagcgttaagcacatccagtacgtagctgacgttgaaaccgatttccatttcctcgccttcatagctaacgtccagaatctcttcggcttcttcctgctcagggttgtttgccgtgatcttgagctgattatggctaacatagaggcgaacaccgcggaatttctcattcgataaaatagcggcgcgggcgaaggcctgcttcagcaaatcacagcctgcttccagcgttttatccggattcttcggcaatacacggcgataatcagggaaacggccgtcaaccagcttggaagtgaaaataaaatcacccacgtgagcacgaatgttgttactgccaatttgcagacgcagtggcgtgtcgccgccgtccagcaatcgaaccagttccatgacccctttacgcggcacgatcaccgaatgtgaaggcaaagtctggccaataggcattgagcacaccgccaagcgatggccgtcggtggctacggtgcgcagttcttcaccttcggtttcaaacagcataccgttcaagtagtaacgcacatcctgatgggccattgaaaactgggttgactcaatcagacgcttcatcgtggcctgaggcagcataaattctacctcactttgccagtcatccagattcggaaaatcagcggcaggcagcgtagacaacgagaagcggctgcgaccagaacgcaccagcaggcgatcgccatccagcgccacggtaatttcagccccttccggcaacccacgccagatatcaaaaaacttccgcgcaggcacggtcgttgcgccctgttcatgggagtgggacaaggcgactcgcgccaccatttccatttccagatcggtaccggtcagcagcaaagagccttccgtgacttgcagcaacagattgcccagaattggcaacgtcggacgtccacccagcgggctactgacctgttgcaggggttttagcagatgctcacgttcaatgataaatttcatagcgctaggaggataatgttctgattaagttagagaaatcttctttgatgtcgtgactttcttcacgcaactgctcaattttccggcaggcgtgcaacaccgtggtgtggtcgcggccaccaaacgcatcgccgatttcaggcaggctgtggttggttagctctttggccaatgccatcgccatttggcgtgggcgagccaccgaacgagaacgccgtttggagagcaggtctgcgaccttgattttataatactcggccactgtcttctgaatattatcgatagtgaccagtttttcctgtaacgccagcaaatcacgcagcgcttcacgcacaaaatcaatggtaatggcgcgtccggtaaagttcgcgttggcaatgacgcggttcagcgccccttccagctcacgaacgttagaacgcaggcgtttggcaataaagaacgccacttctcctggcagacgaatatcattttcatccgcttttttcatcaggatcgcaacgcgggtttccagctccggcggctcaatggcgaccgtcaaaccccaaccaaagcgtgatttcagacgatcttccacgccatttatctctttcgggtagcgatccgaagtcaaaatgatttgttgattaccttcaagcaaggcgttgaaagtatggaagaactcttcttgtgaacgctctttattggcaaagaactggatatcatcgatcagtaacgcatctactgaacgataataacgcttaaattcttcaattgcgttgttttgcaacgcttttaccatgtcctgcacaaagcgttcggaatgcatgtaaaccactttggcattggctttacgcgccatgatgccattccccaccgcgtgtaacaggtgagttttacccaagccggtgccgccgtagaggaatagagggttataggcaccacccggattatccgcaacctgacgggctgccgcgcgggccagctggttagatttaccttcaacaaagttatcgaaagtgtgcttagggttgacgttagagcgataagaaagctctggctgcgccggtgagctgtcccaactcggacgcatcggcgcactgcgaatcaccggagcggcgggcgcactgacgctggcggcggtaaccggttgattctgtgtttgcaccatgggtttgctgccaacttcaaagcgaagcaagggtacgtttgtaccgcagaagtcattaagcaaaccattgatattgtttaagtacttatcacgtacccagtccaaaacaaaacgattaggtgcgtaaagcgccagagtattgtcactcagttccgcctgtagggggcgtatccacatactaaattctgtggcaggtaactcatcctgcaatcgggcaagacactgctgccaaagcgaaagtgacacggcggactccactcgaacaagatcaataaaagaaagaaatcaggatattgtgtaaatcatcgtttttgacacacgccaattggcctgtagcaggccgaagcgacatgcgaaccgtttttacggttgtttttttacgattaacatccccccacgatcccagagtagagatcgcgatcggaatggcggatcatagcgcaaaaggagcaatagatcctccccttcctcacagattagatcctttttatccacaggtgtggcttgacaaacaagtgtaacccaccgcgccgcatttggttgagcacatcagcattaatcaagaaaaatttcagactttcctgaaataacccacagcctgcccacaatccgatcccctgatgagaacaaaggatcttgatgcgatccttgcgatttatcagggagtccgtataatcctcagccctacgtgtgatgcctgttttccagatggctttggccaaacggaatccttcggtaaacacgggcaggctccttggtaaactcccggtttggaaaacttccttactggcttgcgcaatgtgaattgactcaggactgtacaattattacaatcccgcttctttatatgttgcgattgaggcgtcggtggtcttcactccgagcagccaaacgcgtttactgaatcagtaataattttaagtttaggtagaaatcgctatgaaacgcactttccaaccgtccgtattgaagcgcaaccgtagccacggtttccgtgctcgtatggccaccaaaaatggtcgtcaagttctggctcgccgtcgtgcgaaaagccgttctcgtctgactgtttctaagtaataaagctaaccgactgagtggttaagctcgctttccctagggagttacgtttgttaactcccagtcatttcactttcgtcttccagcagccacaacgggctggcacgccgcaaatcaccatcctcggccgcctgaacgagctggggcatccccgcatcggtcttaccgtcgccaaaaaacatgtcaaacgtgctcacgaacgtaaccggataaaacgcttaacacgcgaaagcttccggctgcatcagcacacgttaccgtctatggattttgtggtgttggttaaaaaaggtgtggctgaccttgataaccgtgcgttgacggaagctttggaaaaattatggcgccgccactgtcgccaggctcccgcatcctgatcggcctgattaggggctatcagctcgtaatcagtccgctgttggggccacgctgtcgtttccatccgacgtgctctcattacggaattgaggcattgcgccggtttggcatgataaaaggcagttggttaacgctgaaacgcgtattaaaatgccaccctttgaacccaggtggcgatgatcccgtgccgccgaaacccgacgataacagagaacactaacgatggattcgcaacgcaatcttctcctcatcgcgctgctgttcgtgtctttcatgatctggcaagcatggcaagtggataacaacccacaaaccgccgcccagaccacgcaacagacttcgaacgcagctaacggtgataccgcaagccaggccgtgccagccagtggccaaggccaattgatcacggttaaaactgatgtgctgtctctgaccattaatacacgtggtggtgacattgagcaggctaacctgctggcttacccggattctctgggttcagacaaaacatttgagctgttggaaaccacgccagcctttgtttatcaggcgcaaagtggcctgacaggcaagaatggcccggacaacccggcaaacggcgaacgtccgctgtttgaagtggcgcaaaacagctttgtgctggctgacggtcaggatgaactgcgtatccctctgacctttaccggcaaagatggctcggtctttacgaaaacgttcatcgttaaacgtaacgattacgcaattggcgtggattaccacgttaaaaacgcctctgccgcaccgctggaattgacgttatttgggcaattgaagcaaagcatcaacctgcctaaacaccgtgataccggtagcaataacttcgcactgcacacttatcgcggcgcggcgtactcctctgatcaagataattatcagaagtatgctttcgataaaatcgaaaaagaaccgctgaatatcaccaccaaaggtggctgggttgcgatgttgcagcagtattttgcaaccgcgtggattccagcggctaacgaaactaacaccttctattctgccgatctgggcaatggactggcggctatcggtttcaaaggtgcgcctgttgtcgtacaaccgggtgaacagaaacagctgggagcaaccctgtgggttggcccggaaattcaggacaaaatggccgctatcgcgccgcatcttgacctgactgttgactacggctggctatggtttatctctcagccactgttcaaactgctgaagttcattcacggtttcgtcggtaactggggcttctccatcattgtcatcacctttatcgtgcgtggtatcatgtacccgctgacgaaggcgcagtacacttcgatggcgaagatgcgtatgttgcagcctaaactggccgcgatgcgtgagcgaatcggcgacgataagcaacgtatgagccaggaaatgatggcgctgtacaaagctgagaaagtgaatcctctgggcggctgcttaccgttgatcatccagatgccaatcttcctggccttgtactacatgctgatgagttccgttgagctgcgccatgcgccgtttatcctgtggatccatgatttatcggcgcaagacccgtactacatcctgccgattctgatgggtataaccatgtacttcatccagaagatgtcaccgactaccgtgactgacccgatgcagcagaagatcatgacctttatgccggtaattttcacagtgttcttcctgtggttcccagcaggtctggtactgtactatatcgtcagtaacttggtgaccatccttcagcagcagttgatttaccgtggcctggaaaaacgtggcttacacagccgcgacaaaaagaaataatgtgtatcggtaatcatctgtagtaatagcctaaggcggtcaattgaccgccttattcttttttagtagaaaccacttttacgccgtccaagagagagataaccatgagcgcaacggatacgatcgtcgcacaagctaccccaccgggacgcggtggcgttggcattttacgtgtttcaggccgtgccgtggcggccgtcgccgaggcagttttgggtaaattacccaagccgcgttatgccgactatttgcctttccgcgatgccgacggcaccacgctggatcagggtatagctctctacttccccggcccgaattctttcaccggcgaggacgtgcttgaattacaagggcatggtggccctgtaatactggatttattgcttaaacgcgtcttggccctgccaggcgtgcgtattgctcgcccgggggaattttccgaacgtgcgtttctcaatgacaaactggatttggcacaggcggaggctatcgccgatctgatcgacgccagttctgagcaggccgcgcgttcggcggtcaactcgctacaaggcgctttttcagtccgaattcatcaactggtggaagcactcactcacttgcgaatctatgtggaagctgcgattgattttcctgatgaggaaatcgactttctttctgatggcaaaatagaaggccagttgaacggcgtaatgcgtgatctggaaaacgtacgcgccgaggctcgtcaaggcagcctgctgcgagaagggatgaaagtggtcatcgctggtcgcccaaatgcaggaaaatccagtcttctcaatgcattagcaggacatgaagccgccattgttacagacatcgccggtaccacccgcgacgtgctgcgggaacatattcatatcgacggtatgccgctacatattattgataccgctggcttacgggaagcaagcgacgaagtagagcgaattggtatcgaacgtgcttggaacgagatcgaacaggctgacagagtgctgtttatggtcgatggcacaaccactgatgctactgaacctgcgacaatctggccagagtttatggctcgtttgcccgcaacattaccgattaccgtcgtacgtaataaagccgatgtgacaggcgagacgcttggtttaaccgaagtgaatggttactcacttattcgtttatcagcccgaaccggcgacggaattgacctgctgagagatcacttaaaacaaagcatggggttcaccagcaataccgaagggggcttcctggctcggcgccgccatttacaggcgctggaagccgctgcacagcatctggttcaaggtcatgagcaactggttggcgcacaggctggcgagcttctggctgaggagttacgccttgctcaacaatcacttagcgaaataaccggtgaattcagctctgatgatttgctgggccgaattttctcaagtttctgtatcggtaaataatcaaaaccgaatcgggctaagccaaatacagtgcttatcccgataatttatgatggcattttattcagaggccatcataaagatcaaagaacattgcaataagtggtgagtgagcactcaccacttacagagttctagctaataaaggcgctcaatcggcaaaagcatacttttacctcatctactccctatcgcgctgctgctattgcgcccttaaattaaggttatttataattgacggtgaaagtagccgtagtcatcagactgccagcagcaattctattctcggtttgatagaatctggccttatagggcagttgggttaaagtagagagactcccaagcggttgttctgtatcaaaaaccaaaggagcatcccgctcaactatttgaatgcccacccccgctgaagtagatgtcgaatccgctttgatgacgccgttgctacttccaccctgccagataatagtcgcttgaacccctccactacactgcacttcaatatcaaaacttcgctcaccgctagtgctgccgacacctttaaaggtatttttcaatacagcgcccattggaacatcaatttggggcgtcctgacttcacaggtttttgccgttactttaaaactgggaatttcgtagctaaataaaatctcatcggtattgaatcccttctcatcctgacgagctaatattatttttattggattaaccacaccagagtcggcattcttatcaactgatatataaaatttaccggtgaagttttttctgacaccgatccctctcatactaccaacattcatttcctgagggcttaaattatttggttggaggctccactttattttcactcctaacagattggtatcaaaataattatttatgccaatactagacacacccagcatagacttaacataaattccctgatgggttttccccggacaatttacgttaattccacttacagttttaactattattttcggtgaatgagccatatctcgacgaatagaaatatcatcaaaattaactacccctacagctctgttagcgttacatacaggggattttgcagctttcgctccatttaaataactacaaaaaataatagatataactaacatcaatcctgttttattatattttcggctaagaaaaatataattaatagaagcaaacataaaaaatccttttaataacgacactgggccacaagccgtaaaacacctgatttatctgacatctttgataaatctaactttgcataacagtgctgagcaggctcttttccccattgcacctttatttccgcattttctggaacggcgtttaagtacaactcaccttcatcaccaacaattccactgctatcaccgtttaccaacgtggcactggaaccaaaaggtacaggcttattatcactaagtaatgtcaccagtattcggtgcccctgccggacgcgaaaatcagcggcaaccaccgcgccacgggttggtacaacttgctgcactgactcatccaaatcgaggccgtcagccagtccttctgtatctaaagccacgcggttataggcataaggttcaatagacggaataactgcataacctctcgaatcagttttaatgcctctctgatttaatatttttgcttccgcagcgccttctgctctaaccaatgccaccgtctcccctaaagattgagagaaagtaataccatcacggtgagcaacaataccgcccgataatccgtaatttagcattctgctattatcgctatggctatatgccatattcatgcgtccagcattatgaacatattccaacgacgcgccggcgctggttgtcgcataattattactttgatccatgcggataccgtataacagcgcacgatcttccaaagcacttccattaaacgctacctgttgtgttccctgtccacgatcgtttctattaataccgtaggttagggttccatttgatatccatttatccaaaggaatagaaacgttaaaagaaacctgtttatccctggcggcggtattttcacgactatcgctataagaaaggtttaatccatatccaatacccgcgcgattaatagtatatccggcggataatgattggttttttccctgctttccccagtagtcctgctggttggctgacaaataaacactgcccaaatcacccattccctgatttagagttaactgtatttggctacgtttatttagcccagcgttaactgattttttcgctgtatattcgtttgcttccgcaaatgagtagtagcccgatgtagaatagcgatagccagctaacgtcagcgaagttcccgtggtttcaatactttttgcatattgaatacgataagactgcccttgtttacgctgattatctttcagtctggcatcggccagagtcgtatccagagagatagcaccgaaattacctaagccgagtccaaatccggtatttaacgcgcgataattatcagcagcctgtataccagaaagtaaactaactcgattagaaagcccataaataaaggagccttcaccaaaataaggctgataaatattggccccagaacttctgtaacggccaaaagttacctggtattttaattgcccttctctttgcatcatcggcactgaagagaatggctggacaaatttacgctgttgcccgttcttttcggtgatcgtaacctctaaatctccggaaccagaagttgaatagagatcggatataacaaacggcccaggcggcacataaccttcataaataacataattattttggcgaaccgttacccgagcgttggtttgagcgataccacgaataatgggtgcgaaacctcgctggcttcctggcagcattaaactatcggatgaaatggatgcacccgtgaactgtatactgttaaatacatccccgtcagtgaaagcttcaccgagaatcatttggctctttaaccgatgaatatctcgctgaacgtaactgttaatagatgagaaacggctaccccccttattttcttcagagtcatgactataggtagattggtttctgatacgccaggaaccaatattaattccacttcgtacatttaaaaaatagctttggtttttacttgttccattatgattatccgagccggttaaatcatagttcactaaaaatgaagacagcccctgttgccataaatgcgatgaaacggcatctctgacctgaacatctagcgcagcctgcgggatgctgatatccaaacgttgagaataaaaatcaaaaacaacagacgcctgaggaatatattctttaaggtcatcaataatatgttttgaaggaagatcactcagcgtcggagttgacgatatttttacgccaaagcggcggaggtcatccacggttaactgtggtaataatgctttatccgccgtctgaataaatctgacccgcctggtttctttctcatttccgttaagaaatataaccacctgatactcaccgggtaattgaccaccagagtttgaaaaagcgcttaaatcaataacagcttgctctgcatcacttaactccaacgcagataatcgaaaatggtcttgcgccagaaccgaagatgataagcataaaaaaaaggctgaaatgagcgtacaaaataataactttagcgcacctggatttatatttaacataatacttttcagcctcctgctgatcgttcatcttccttttaccgcagtttttgagtgatctccgggctgacaccaccgtagctattaatgctgctccactttacggcacaacccgctaagcccgatggaagtaagaagtgggaaacaccctgcggagctatcatgtccgcgcctgccaaagctttaccattaaccctaatttgtcctagagtgacgtaataattgctggggtttttcacctcaagctggttaccaatacgacgaaacatcaatgatttataagcctcttccgcatctccaatgatgcctttaggccggtaaaacagtttgatcctcgttttaaccgctattaataaagtactttgttcattttcttgcaccgaaggaatagatttcacattcaggtaaaacaccgattccctatcttccggtaagtgaccaccggtgcgcacaattctgagcgtactttctttacctgcatccaaacgaaataatggaggcgtcacgacaaagggaggtttctcaccttttgtattgctattgataaaggattgaattaaataaggctttgtttcatcggaattaattaccgagattgacgcctcttttttatttccatcatagataactcgtgttcctccaacggtgacacctgcccaagccggatatatgaataacattgataatatcaacgttattttcctaataaaaagacacaaattaaataaatcatttattttagatttcataacaactgtccatggtgttaattatccctggcaaatagccatcacaattcgcctgctgccagggaataaatttttatgaaaattaatttatatttttatttataagaaatgtcgaagtttagagtagcctctgcctttcctgctacgccagattgaccattagcgacataagcgactttaaaaggaatgtttacattagcgctattaatagcatccgggtattcatagctagctgaatttaaagatatttgatttccatctttgtcgtaaagacctataccgatcccttcagcgcctgttgcatctaattttaacaacttgtcgtcctcgagatctgccgtaccggtaaaagcgatagacataagaaccggagctccagtaacaaccgggcaacccgttaatttaatatcgaaatctctctcacttccgctaactttatcgcctttattttttatctcgctttttaaaaatgcgcccattgggacagaaagtgctgatccgccagaaatggtacaggttgtttccataattttaccggtaaattttaccgttccgtttgttaccccataagtcgtgctacttaaagacatcaacgtcccagtaattaatgataaaaccacccttcttttcatttacatctccttgacaaataaaataaatatccattttttaaacttcaaaataaaagcgtaaataatttatgacaaaaacaactttccagtacagatataaatctgtactgagataacaatgacaaataacttaaaaaaccagaataaaattttcgataaaaacaagaaataagagctttaaatagctcctatgtttttacttttaaataaccattagcgatttgtaaaatccatttactttcttaattaagattccatccttagccttttaattaatatcttttaaggagaaaattatatgggattttatgattcagatcaaactttaatctatttacagtaaaacaagaaaatgacttaagttaaattgtttttttacaataagttaaagtttaaagtaaataattctttacacttagaagttaattatctctaccttcatctggtctggcctgtgggaattttctgctttatttaattaataatctcccaaaacttaatcatctttgttatctattccgatataaaatgaaataacctactttattagtatatttatttcgagctattaacctgtttaaaccgaggtattatccttaaaaaaaccagataaccacattatttatatgtgtaacattagataatgtctcatctactcatgctaagaaaaccttgtttttcttcatttctcccactggatctaatagccgggataactgagtattcttcagttacatccaccgaggagccttgttttgatggcaatatcaatgagtaaactctctcaatccaacctttcctgattgaagttattgatggctgcactaagttactaagttactaagttactaagttactaagttactaagttactaagttactaagttactaagttatagacatccattttgctcaaagaatacagctctactgttgcaagccaattaacgtttttttagattattattagtacgatagaaacagcatgaccctttttattatcaaacccaagccttacaccaagtcactcttaggtagcgatatttttattgatattcagcaagataagcagacaaatacctattgtttaattcgagtaagcaagcctaatctagttcaagacaatattatttcaccaattaacaggagtgagtcatgtcacagcagccgcttaaacttgttaccttactgggtagtctgcgttccggttcctataacgctatggttgccaaagccttgccgcaattagctcccgctggagtgactatcgaggccctgccttctatccgcgatattcctctttatgatgctgatgttcaacaggaagatggcattccagctagcgtagaagccattgcagagcaaatccgccaggccgatggcgtgatcattgtgacaccagaatataactattcggttcccggcggtttgaaaaacgctatcgattggctttctcgcctacaaaaccagcccttggctggcaaacccgtgttaattcaaacgagttcaatgggccctatcggcggcgcacgctgccaatatcacctgcgccagattttggtcttcctcgacgctatggtgatgaataaaccagaatttatgggcggcgtaattcagagcaaagtcgatgaagagcgcagagaattaaccgatcagggaaccttggattttctgactaaacaactcgccgcgttcagcgcttatattgagcgagttagagtgaagtaagccccattttgcatcagacccggataaaaaaagccccgatctctgcagattcggggccatttttattactcgatcaaataattaatgatcgacaaaggcaatttttagcacaaagagtaacgccacaacgacgacgcaagggctgatttcacgccaacgcccggtgcccagcttcattacgcaatatgcgataaagcctaaagcgataccttcagtgattgagaagctgaatggcatcatggcggcagtcacaaaggccggaaccgcttcggttaaatcatcccatttcactcgagccaggctggatgtcatcagaaccccaacataaatcagcgcgccagcggccgcataagcaggcaccatcccggcaagcggtgagataaagatcaccagcaagaataggatacccaccacaacagcggttaaacccgtgcggccgccgacggaaacaccagaggagctttcgatataagcggttaccgaagaggttcctaccagcgcccctgctacagagctgatactgtcgacgtaaagcgcctgtttcattcgagggaacttgccgttttcatccgtcagacccgctttatctgttacaccaatcagcgtgccagatgaatcgaaaagattaaccagcataaaggagaaaatgacgcctgccagacccagattcaacgcaccggcgatatccacttggccaacaacgctggtgacgctgggtggcatggagaaaataccgtgatactgcacatcgcccaacgcccagccgatcagcgtagttacaacgatggataccagcactgccgcatggatattacgcgaagccaataccgcaatgataaagaagcctagcgctcccaataggacgctgtgggagctcagatcgcccacggcgaccagtgtgtccggatttgctaccactataccggcatttttcagacccatcatcgcgataaatagaccaataccactggtaataccgacacgaaggctcaatggaatgttggcaatcatccaatagcggatgcggaaaatggtcaatagcaggaaaccgattgcgccccagaaaatagcgcccatcgccacctgccatgaaatacccatagcgccaacgacgacaaaagcgaagaaggcgttcagccccatagcgggagccaaagcaacaggtaagttcgccaataatcccattaaaatactgccaaaagcggcgatcaagcaggtagtgacaaaaacagcctgcacatccataccggcaacccctaggatttgggggttaacaaaaacgatatagaccatggtcaggaaagtcgtcataccggcgatcagctcagtgcgcgccgttgttccatgttgttttagcttaaatacgcgttcgagcatcccctgctcaacatcaaggtttggtttactcattatcagagtccacaatagggggtgaatagtcggctgctatcctataacaaaacgcgtcaatgttgagccggatcacactcttttttagctatttttcgcagaggtttgtatcaaatagccccgtttttacggctactccacttaaaaaaaaccgctgattttgacgattttcttactcaatcgactgtatttattaaatttgttattaattactacgctaatcatgacaataaacgtcgcaatattaatccgtgacgttaaagtgggtttaagcgatttttacagcaaggattggtgctatgtctcagattcaatgcgtcatgtttgattgcgacggaacattagtagacagcgaagtgctatgttgccgagcctatgtgctactttttgcccattatggtattcacctttctctggaaagcgtcattaagcgcttcaagggcataaaactctatgaaattattgagtgtgtcagcgatgaatatcatttaaatcagccagttactgaaatggagagaatatatcgacaggaagtcgcgcggctgtttgacagtgaattgcaacctattaccggcgctaactcactgttaaaaaaaataaatgtgccagtctgtgtggtatctaacggaccggtcagtaagatggagcactcactgggactgacagatttacgccatttcttcgctaatcatttatatagtggctacgacattcagcgctggaaacccgatcccgccttgattcaccacgcggccaataaaatgcaggttcccgttgaagcctgtattttagtcgaggactcgctggcaggcgctcaggccggcatcgcggcgggcataccggttttttactattgcgccgatccccataaccagccaatcgatcatccattagtcaccactttttactatatgcagcaacttcctgagttatggcagctaaaaggctggaaactgacgaaaaattagctggcagacagcgccggtttattcctccaccagcgccatgttcgtttaattgcccgcgtttgcgggctgaaacggcgattgataacgttggccgatacatccaaagtcagacaaaaaacaaagtaaatcagggcaacgaacaggaatacctccatcgggtacaccatgctgcgattattaacctgagtagccagaaatgtcagttcattcacgccaactatataggccagcgaagtatcttttatcaatgagatccattgattgataaacgacggcaccatcatgcgcagcgcctgcggtaaaaccacgtaagccaatacctgccaacggttaaatccgagggataaccccgcttgccattggccttctcctatcgctagaatgcccgcttttaccgcgtgagccagataggccgaggcaatcagcgccagcgcacacaccacggtggtaatttccggaatatctacgccaaaaacgatcggtagtaaaaaataggtccaaaaaatcagcataataacggggatagcacggaaaaaccctaaaaccgccgccagtattccgccccatacgccccgcgacatcgccagcgctacaccaagaataatccccagagctgccgacgccgctcccgccatcaggctaatcgccagcgtcagcgccgcgccgcctaatgggccatcggggaacgttccccacaacaaatagcgccagttatccgcaataatcgtaaaatccatcttaatgccctcgcgcaatcaatcgctgttgacgccacattccccaagcctcaatcaacgcaataaccgagatatacaacagagtcgcgacaccgaaggcctgaaaggtgcgtaaagtttcagtttcaacctgacgagatgcataagaaagttccgcgacgccgatcgccatcgctaaagatgagttcttgattatattcatgtattgccccaataacggcggcatagctatttttagcgcctgtggcaaaacgacgtaacgcatggattgccaacccgttaacccaagagcgtgagcagcatttttttgccctttagcgacgccgctaattcccgcacgtaattcttccgcaataaaagccgtggaatacaaagtcaggccaataaatccggccagaaactcaaatgaaggccagggcagtccccatccgggcaaggataattcatggggtgtatttaaccactgcatccataatgcaggcagtaactgaccggcggcgaaataccagaaaaaaagctgtattaacaaaggagtattgcgaaatagcgtactgtaggcgattgccaaccacagaagcagttttaggtggctgtctctggctgcagccagtacaaaacccagcaaagtcgcagcgacgaccgtacaggcggagatccatagggtcagtaaaaagccgtcccatagccagccaatatagggtgaaaccagcaaccaatcagttaaccgatgaaaattcatatacttccgtacccgtcgggttatcgttcaaatccatttggcgcgactctccctgtcctgcaaataacgcccttgcgtaaaacaaataaccccgcattggctatcaatacggggcatccaggctcagtgcatcatcgcaaaaaatcaggctttaggctgttgatccaaaggtgcaaacttaaaatcaccgcgcggctgggcagatttggtttccggcccgaaccagtggttataaatcttcaccgcgtcaccgtctttctccagtttttccaacgtttgatttaccactgcagtcagacgatcctcacctttaggaatcccgatgccttggtattctttggtaatactgaacggagatatttcaaaatcagctttttgcgcggcggggacgttacccaataacccaactaatttggcatcatcctgagtaatagcctgaacgttaccattacgcaaagcggtgaaagccagcggcgtatcatcgtaggaaatcactttagctgtgggataacgctcccgcagggtaatttcttgtaccgtacctttatccgcgccgatacgcagttttccgatgtcttccggcgtttttagtacccctttgcgggctatgaatttctgtcccgtggcaaaataaggcaggctaaagttcacttgcttagcacgttcatcggtaatggtgaagttggcagcgatcaaatcaacttttttcgatgctaatagcggaatgcggttagctgggtttgttgcctttagctctagctttacgcctaaatctttcgctatcgcattcgccacatccacatcgtagcccaccagctttttactttgctcatcgatatagccaaacggaggattgctatcaaaaaccgcaattcgcaccacaccagcctgtttaatatcatccagtttatcggcgtgagccatgccggaaagcgtagccaaactggccaacagcgttaatgtgatcgcctggtgtttcatggatagctcctaagtgattgatgtgctgcattggctataagctatcaatttgttcttaggtcaggaaataatataaaacgctatatttataaccattttaaccaaacgaggaattttgagtatattgggcggggagtcagcgtttggggcaataaaaagcccggagaaccgggccgatagcgttactttttaccttcggaaagcaatttttccagatcgtccccgcccaaatgacggaaatcatgacctttgacgaagtaaaaaataaactcacagatattctggcagcgatcgccaatacgctcaatggaacgagcgcagaacagagcggttagcacgctgggaatagtgcgagaatcttccatcatataggtcattagctgacgaacgatgccttcgtattcctgatctacctttcgatcttcacgataaattcggatggcttcgtccagatccatacgcgcaaaggcatccagtacgtcatgtagcatttgcaccgtgtggcgccccagagattccaggctaaccaacagcggctgatgctggtgggagaatttctccaacgccgtgcggcaaattttgtccgctacgtcgccaattcgttccagttcggaaatagttttgatgatcgccataactaaacgtaaatcgctggcggtaggctgacgtttagcgatgatgcgcacgcaggcttcatcaatcgccacttccatcatattgacctttttatcgccttcaatcactcgctttgccagttcaccatcctggttatgcatcgcggtgatagcatcggtcaattgctgctcgaccatgccgcccatggttaacacctgggtacggatatgctccaactcagcgttgaactggccagagatatgtttattcagattcaggttatccataatacttcccgtacgtataagcctatcccaataggcgtaatgaacgcgatcccgttgcgggcgctctggccgaaagtcaatcttcgaccaaattaacccgcagggtcagtgtaatagcctaatcagtcaggcaatcaaccatagcggccggtgatgtaatcttccgtctgcttcatctgtggcgcagtaaacagggtgtctgtatcactgaactcaataagctcacccagatacataaatgccgtatggtctgagcaacgcgccgcctgctgcatattatgggtcacaatcaccacggtatagtcagacttcagctcgctgatcagctcctcaatacgcccggtagagataggatctagcgccgagcaaggctcatccagcagtaatacatcagggcgaatagcgataccgcgcgcgatgcaaagacgctgctgctggccgccggacagactgtaaccgctctgatgcagcttatctttggtttcattccacagcgccgctttggtcagcgcccactgcacccgctcatccatatcggcgcgggacagattttcaaacagtttcacgccaaaagcgatgttatcgtaaatcgacatcgggaacggcgtcggtttctgaaataccataccgaccttggcgcgcagcagagcgatatcttgcttatccgtcaggatattttcgccatccagcagaatgtcaccttctgcacgctgatccggatacagctgatacatcttgttaaaggtgcgcagcaaggttgatttgccgcagcctgatgggccgataaaagccgtgacctgatttttagcaatatccaacgaaatattcttcaacgcatggaatttaccgtaatagaagttcaaatcgcgaacctgaattttgctgttggtggtctcagtagccatactcatcaagacttctctcttttagctaacgcagcctaagctacgcttttgaatttgggtgacgtatcagtattttttcttcgcgaaaataacccgcgccagaatattcaatagcagaacgcacagggtaatcagcagcacaccggcccaggccaactgttgccattcggcaaaaggactcatggcaaacttaaatatggtaaccggtaagttggctatcggctggctcatatcggtactccagaactgattggagagcgaagtgaacagcagcggtgccgtttcgccggcgatacgggctatagccaacagtacgccggtaaggatgccggagattgacgccttcaatgtaattgcagaaatcatgcgccatttaggtgttcccaaggcgtaggccgcttcacgtaggctatccggtactagcttcagcatgttttccgtggttcgtatcacaataggcacctgtaacagcgccagcgcaataacccctgcccagccggaaaagtgctccattctcgccacaataatggtgtaaacgaacagaccaaccacaatcgacggcgcagatagcaaaatgtcattgataaaacgaatgatctccgccaaccacgatttgcgcccatattcagccagatagataccggccataatgcccagcggagtaccgataaccgtggcccatagaatcaggagtccactaccggcaatggcgttagccagcccaccaccagcggtattcggcggcggcgtcatttcggtaaacagcgccaaagacataccgtctacgcctttggtaattgtggaaaatagaatccacaccagccagaacaggccaaaagccatggtcgccagggataaaatcagcgcgaggcggttcttttgacggcgccacgcctgtttcttgcgacgagtttccagcaaggctgcgttagtttgcatatccatagtggtcatattagcgcccctctttcttagccagacgcagaatcatcagcttcgacaatgccagaacaataaaggtgatgacgaacaggattaaccctagctccatcaaggctgcggtatgcaggccagattcagcttcggcaaactcattggccagcgcagaggtaatactgttgcccggcataaacagtgagaagctgtcgagttggtaggtattaccgatgataaaggtcactgccatggtttcccccagcgcgcgccccagccccaacataacgccgccgatcaccccattcttggtgaagggcagcacaatacgccaaatcacttcccaagtggtgcagccaatgccgtaggcagactctttcatcatcaccggcgtttgttcaaagacatcacgcataacggaagcaatgtaaggaataatcataatggccaatatcacaccggcagccaaaatgccgatgccgaacgccgggccagagaacagcacgccaacgatcggaatacctgaaaggacattaccgacaggttcctgaaaatacttggcaaacagcggcgcaaagacaaacaggccccacatgccgtaaacgatacttgggatagccgccagcagctcaatagcgacgcccagcgggcgtttcagccagtttggtgccaactctgtcaggaataacgcaataccaaaactaacgggaacggcaataattaacgcaattaacgaagtgaccaccgtaccgtaaatcggtaccagcgccccgaattgctcggccggagcgtcccactctttggtccacagaaaggcaaaaccgaatttttcgatactcggccaggaggcaacaatgagggaaataatgatcccgcccagcaggaatagggttattaacgcagccagttttaccagcgcgccaaatatgatgtcaccgtgcttgctcggtgctttgatagtcggcttataaccagccatagactctcttctcatccgggtgttatttccctccccacacggggagggacaattaatggaaccaattacagttttttactgctttattcgtttctatcgagcttagaacaatgctttgcctgaactgtcttttatctgcgttttccaggctgcacgtacctgctcaaccacttcggctggcaaggttgcataatccagttcgctggcctgttttgcgccgtgggtgtaagcccagtcgaagaatttcaggacttcagtgcctttttcagcatttttctggtttttgtgtaacaaaatgaaggtagtagaagtaattggccacgcgccttcagcattctggttagtcaggtcctgagcgaatgttttgctccaatcaacgcctttcgccgctgcactgaagttttcttccgttgggctaacggctttaccatcagcaccaatgagtttggtgtaagccagattgttctgtttggcgtaagcgtattccacataaccaatagaacccggtaaacgctgaacgaaagcagcaatgccgtcgttacctttaccgcctaaaccggttggccagttaaccgtagagccagcaccgattttttctttccattccgcattcactttagccagatagctggtgaaaacgaatgaagtacctgaaccatcggcacgacgaaccactgcaatattttgatccggcagttttacgcctgggttcaatttaacaatagctgggtcattccactttttcacattgcccagataaatatcgcccagcgttttgccgtctaacgtcaattcaccggatttcacgcccggcaggttgactgccagcaccacaccaccaataacggtagggaactggaacaaaccgtctgccgctagcttgtcgtcagacagcggcgcatcagaggcaccgaaatcaacggtattggcgatgatttgctttacgccacccgaagaaccaatcccctgatagttcactttgttacctgtttctttctgataagaatctgcccacttggcatacaccggcgcggggaatgtcgcacctgcacccgtcaggcttgcagcagcgaacgcggacacagttgtcatagataaagtcgctgccacaatgctggctacggtggtacgcatcagtctcataatccctcctaatgggatataggtatcaaactcaaaattgttttcatcagattaagtatggtgcaggagggaaaataggacagtttagtgacagaaaaatgtatgaaatatgacagttttatgacaaatcagaaaagcagcggcaaaaccaccaacagtcataggtttcatcaagacattttgcctaccagccagaaatgaacaaaagcacaaagcgtgatttagaaatcgacgatgacaaacactatttaactaaccgataaaacgctatttattacagaatgtgaccagatactctcatagtatagtcaacgcctaaaattcagaatattagaggataaaaccatgagtatatctatggaaagagtacaacatgaaattagaaccattcatagcactgcagtggaccagaaaaaggtaacatcccaaagtgccaaaaagttatataacttaatgaaagaaataaaaaactcacctcttagctgtagtcaagggtgtaaaacaaacgcaatcaatgatttaaataatttaaataaaatactcactgaacagaattcaaagttggttaataaaaaaagcaaaggaataaatgcattactgaagaaaataaatacagcaaaagtagaagaaaacataataaataatagtatttatagcgttggaaaatcatcatacgtaccaataaataatgaattatatgcttcacaagaacatatctatgaatcaataagtgatgatattaatggcccagcagaacctatctacgaatcaataaatgatgatgttaatggcccagcagaacctatctacgaatcaataaatgatgatgttaatggcccagcagaacctacctacgaatcaatgtatcatgacgttaatagttcaccagaatccatctacaaatcaatgaaagcagtaataacaaataccgaaaaaggtacatattccaaaccatttgataactatagtgacaatatatatcaagagccattttatgataaacaaaaatacagcaactcgttaccaataaatgaattaaataatattgagaaatacatagacgaattggcggaaattgctgatgatattattttcatcagaacgccaccaggaatacgcccccccaacacctaataaaacccctgcatcaagtaataaagaacactttatacagattgttaaaaataataaaatacatatattaaaagcaaaaaattaatatataaataagatatagcgatatttacagtcagctcttagaggctaaaaaattttttgataatcaacgaagcgatacgcaatgaattttcattagtagataataagttgggtaaaaaaatgctgttcagcagatcgagatctcgctgaacagcatattcattagatttatagcccgaaattactcaacggtaaccgattttgccaggttacgcggctgatccacatcagtgcccttgatcagagcaacgtggtaagacagcagctgtagcggcacggtatagaagattggagcaataatgtcttctacgtgtggcagttggataattttcatcccttcactgtcggtgaaacccgcgtcctgatcggcaaagacgtacagcaaaccgccgcgagcacgtacttcttcgatgttagatttcagtttttccaacagatcgttgtttggcgcaaccacaataaccggcatatcagcatcaatcagcgccagagggccgtgtttcaattcaccagctgcgtaagcttccgcatgaatataggagatttctttcagcttcaacgcgccttccattgcaatcgggtattgatcgccacgtcccaggaacagagcatgatgcttatcagagaaaccttccgccagcgcttcgatagttttatccagagacagcatctgctcaatacgcgcaggcagagcctgtaacgcatgaaccacatcgtgttccaggctttccggtttacccttcaggcggccaattttagccaccagcatcagcaaaacggtcaactgagtggtaaaagctttggtcgaagctacgccgatttcagtcccagctttggtcatgagtgccaaatcagattcacgaaccaacgaagagcctgctacgttacaaatagccaaagaacccagatagcccagttctttagacaaacgcagggctgccagcgtatccgccgtttcaccagactgagaaagcgtaatcaacagactgtttggacgaaccgctgatttgcggtaacggaattcagaggcaatttccacgtcgcaaggcacaccagccaaggcttcgaaccaatagcgagaaaccatgcctgagttgtaagaagtgccacaagcgataatttggatatgctggacatcagagagcagcttatctgcgttcgggccaagttcagacagatcgatcaaaccgtggttcaaacggccttccagcgtgtttttaatcgccatcggctgttcgtagatttctttctgcatgtaatggcgataaacacctttgtcgcctgcatcatattgaacctgagattcaatttccgcacgttcgacggcgttaccgcttttatcgaagattttcacgctgcggcgagtcacttcaaccacatcaccttcttccaggaagataaagcgacgagttaccggcagcaaggccagctggtcagaggcgataaagttttcgcctacgccacagccgatcaccagcgggctaccggaccgcgctgctaccagcgtacttgggtcacggctatccatcactacggtaccgtaggcaccacgcagctgaggaataacgcgtttcaccacatccagcaaagaaccgccctgttgctgctcccagtgcaccagatgagcaataacttcggtatcggtctcagaattgaacttatagccgcggctaatcagcaattcacgtaatggttcgtggttttcgataatgccgttatgaacgacggatatatattcagaaacatgcgggtgagcattcgattctgaaggttcgccgtgagtcgcccaacgcgtgtgcgcaatacctgtgccaccgtgcagttccgtgctttctgccgcatcggacaaagcctgaactttccccacgcgacgcaaacgggtcatattacctttggcatcaactaccgacagaccggcagagtcatagccacggtattccaaacggcgcaagccttcgatcagaatctcagcaatatcacgttgcgctactgcgccaacaattccacacatcagtttaattcctatttaaggttctttgaaaagaacccattcgatgccagtgacctgattttccggattttccgggttccccgagcctgtagagtttggggattattatgttttgctcgatattctcagccgttagtcgctaaaaaaatcgagcaaaacattcctttcatggcatgacaccatgaaaggatattaatcagctttttttgaccggacgcttccagccttggatattgacctgcttaacgcggctcaataccagctcattttcagccacgttacgggtgacagtagtaccagcgccgatagtggcacctttttcgacggtaacaggggctaccagttgggtatcagaaccaacgaagacatcatcgccaataatggttttaaacttgttcttaccatcatagttgcaggtgatggttcctgcgccgatattcacatctgcgccgatttcagcatcgcctaaataagacaggtggccagctttagagcctttacccaaacgcgttttcttcagttcgacgaagttgcccacgtgagccccctcagccagctcagcgccaggacgaagacgggcaaacggcccaacggtacaggcgttatccaaacgagcatcttccagcacgctgtaaggactgatttcgcaatcatcgccaatcacgcaatttttcaacacacagccgctgccgatgcgaacccgattgcctaacgtcactttgccttcgatgataacgttggtgtcgatggtgatatcacggccatgagttaactcaccgcgcagatcaaagcgagcaggatctaacagcattacgcccgccagcagcagtttttccgcttgttcagactggaaatcacgttccaaagcagccaattgcagacggttattaacgccttcaacttcacttaggcgggaaggatgtacggcttcaatctttttaccgtcagcatgtgccagagcgataatatcggtgatgtaaaactcaccctgcgcgttgttgttatccagcatagacaaccagcgcttcagatcgcgcccgttagccaccagaatacccgtgttaacttcgttaatatcacgctgggcttcgctggcatctttatgctcaacgataccgaccacttcgccgttttcacgcacgatacggccataaccggttggatcgtccaacttaaccgtcagtagcccgataccgccttctggtttagccgcaaccaaacgctgcaaggtatccacagagatcagtggtacatcgccatacagcatcaaaatatcttcatcatcagagaaatgaggcgcagcctgctgcatcgcatggcccgtacccagttgctcagcctgtaacacccagtttaatgccggatcgctcagcgtctttttcagtaaatcgccaccgtgaccataaaccagatgaacattgctggaacccagcttcatcgcagcatcaataacatgctgaaccataggcttgccggccaatggatgtaataccttgggaaggtcggaatacatgcgcgttcccttgcctgcggcaagaataactacgctcattgtgctgttagacataagcaacctgataactccaattgaattgacggaagtaaacccgtttaccgataaaattactacatatttctcagcgaaaaacgccgcaaacccgcaccgttaaaggattgtttcacttagcgaaaatccaaaaaaaaagcgagagatactgtctgcgatcgacgacgttttaccacttttatcggctgagaaaacctaactctatcgcgcaataaaacacttattttacggcaagaaacaagataattcagaaagaaaacgccttcctcataatcaactctcgccgaaataagacatccccccaaaggctaacgatgcttttgcatcgaaacatcattaccgactttatatatccgataatagttatacggatcgcaccttattaagtaaggtttaacaatcttaaaaacacaatgaaatgaccgattgaataggaaaaaccgagaggcgagatcgaagaataaagagaatcatgggattcgcagaaaagaaaaatgccagtcagcttgcgctaactggcaccttattactctatcagtcaggccgctttaggcaacctgactcgataaagttacatcgctttacgggtcagttcgattacgcgtaatttcgcaatcgccttcgccagttcagcggatgcctgagcatagtcgacatcaccgtgggaattgttgatatgggcttcggctttgcgcttagattccagcgccttagcttcgtccagatcggttccgcgaatagcagtgtcagccaatacgatcacaacgctcggttgcacctcaaggatgccgccagaaagatagataaactcttcctcaccgaactgtttaacaatacgtatcatgccaggcttaatggcagtgagcagcggggcatggccagggaaaatacccagctcaccttcactacccgtcacctgaatcttttgcactacgcctgagaacattttcttctcggcgctcacaacgtccagatggtaagtcattgcagccatgtcaccctccagtcaacagcgttacagtttcttggctttttccactgcttcttcaatggtgccaaccatgtagaacgcctgctccggcaggtggtcatagtcgccattcatgatgcctttgaaaccacggatggtatctttcagcgacacgaatttacccggagaaccggtgaagacttctgccacgaagaacggttgagacaggaagcgctggattttacgcgcacgggatacaaccagtttgtcatcttctgacaactcgtccatacccagaatcgcgatgatatctttcagctcctggtaacgttgcagaatagactgcacgccacgcgctacatcgtagtgttcctgaccaacaaccaatggatcaagctgacggctggtggaatcaagcgggtcaaccgccgggtagatacccagagaggcgatttgacggctcaataccactgttgcatccaagtgagcaaaggtggttgctggtgatgggtcagtcaagtcatccgcaggtacgtaaacggcctgtacggaggtgattgaacccgtcttggtggaagtaatacgttcctgcaacacgcccatctcttctgccagcgttggctggtagcctaccgcagatggcatacgacccagcagtgcagatacttctgtaccggccaaggtataacggtaaatgttatcgatgaacagcagtacgtcacgaccttcatcacggaatttctccgccatggtcaggccggtcaatgctacgcgcagacggttacccggtggctcattcatctggccataaaccagtgatactttgtccagaacgttggagtcagtcatttcgtggtagaagtcgttaccctcacgagtacgttcacccacgccggcaaagacagaataacctgagtgctcgatcgcgatgttacggatcagctccatcatgtttactgttttacctacacccgcaccaccgaacagaccgactttaccgcccttagcgaacggacaaatcagatccattaccttgataccggtttccaacagatcctgcgagctggcaagctcttcgtaagaaggcgcttcgcggtggattgcccaacgctcttcttcaccgatggcacctttcatgtcgattgggtcacccaatacgttcatgatacggcccagagtagctttacctactggcacttcaattgggtgttccaggttgattactttcaacccacggctcagaccatcggaagagcccattgcgatacaacgaacaacaccgccgcccagctgttgctgaacttctagcactagcttggaagccgtgccttcgacctcaagggcgttgtacacttttggtacagcgtcttgggggaattcgacgtccactacggcgccgattacctggataatctttccagtagccatcttgaatcctctacgtaatacatttacccgtcatacttcacattgctgacgcgttggctgtcttctttcactcccgctgcttacttcaagtaaacacccggaggctcgctcagttgccgccttcccgcaatatgaactatttggggtaatagcctggttaaaccgcggaggctcccccgacgatctcggtgagttcctgagtgatgctggcctgacgagccttgttgtaaaccaactgcagctctttgatcaggctaccgccgttatcggtggcggctttcatcgctaccattcgcgcggcctgttcgctggccaggttttcaacgacgccctgataaacctgtgattccacatagcgacgcaggagggtatccagcaacgctttaggatcgggttcatacaggtaatcccaggatttcttcttcagctcgccgtcttccgcaggcggaagaggtaacagctgcatgatccgtggttcctgagacattgtgttgataaacttgttatttactacatacagtttgtccaggcggccttcatcgtaggcttgtagcatcactttcaccggcccgatcagttctgacagagaagggttatcccccatgccagtaacctgagcaacaatattgccgcccacggaaccgaagaaagatgccgctttggaaccaatcagggcaagatcgcactcaacgcctttctcggaccaagctttcatctcagccaacagttttttgaacaggttaatgttcaaaccaccacatagaccacggtctgtagaaaccaccagatacccgacgcgtttcacttcacgttcgtccaggtaggggtgtttgtattccagattacctaacgcgaggtgaccaatcacactgcgcatcgtttctgcataaggacggctggccgccatgcgttcctgcgatttacgcattttggaggcggcgaccatctccatggctttggtgatcttttgcgtgttttgcacgctggcgatcttggaacgtatctcttttgcgccggccatttctgcttctcctcattgccagacggcctgctttcctaacgaaaagcaggaccgaatagcgttaccaggactgggttgccttgaatgtgtcgaggatgcctttcagcttggcctcgatctcatcgttatacgcgccagtttggttgatttgttgcagaagctcagcgtgctcacggtcagcaaaagctaacagcgcagcttcaaagctacccaccttcgccagctcgatatcacccagataaccacgttcagctgcgaacagaaccagagactgctgtgcgacagacatcggcgcatactgtttctgtttcagaagctcggtcactttctgaccgtggctcagctgtttacgtgttgcatcatccagatcggatgcgaactgggagaacgcggcaagttcacgatactgtgccagagcggtacggataccaccggacagttttttcatgatcttggtctgcgctgcaccacccacacgagatacggagatacctgggtttaccgcaggacgaataccggcgttaaacaggctggattccaggaagatctgaccatcggtaatcgaaattacgttggtcggaacgaacgcggaaacgtcacctgcttgcgtttcgatgatcggcagagcggtcaaagaaccggttttacctttcacttcacccttggtgaatgcttcaacgtagtccgcgttgacacgcgcagcacgttccagcaaacgggagtggaggtagaatacgtcgccaggataagcttcacggcctggtggacgacgaagcagcaaggagatttgacgatatgcaacggcctgtttggacaggtcatcataaataatcagcgcatcttcaccgcgatcgcggaaatattcacccatggcacaaccggagtaaggtgccaggtattgcaatgctgcagattcagacgcggtagcaacaaccacaatggtgttagccaaagcgccgtgttcttccagtttgcgcactacgtttgcaacagtagaggctttctggccgatagcaacatacacacatttgatgccggaatcgcgctggttaatgatcgcatcaatcgccagagcagttttaccggtttgacggtcaccgatgatcaattcacgctgaccacgaccaattggaatcatggcatcaacggatttataaccagtctgaacgggttcatcaacggattgacgttcgataacgccaggtgcaatagcttcaacggctgagaagccgtcgttttctaccggacctttaccatcaataggttcacccagagtattgacaacgcgacccaacaggccacgaccgacaggaacttccaggatacggccagtacatttaaccttcatgccttcagcaagatcggcgtacggacccataacgactgcaccaacggagtctcgctccaggttcagtgcgatagcgtaacggttgcctggcaatgcgatcatctcgccttgcataacttcagccaaaccgtgcacgcggatgatcccgtcgctgacggaaacaatagtaccttcattgtgagcttcgctcaccacattgaactgagcaatgcgctgcttgatcagttcgctgatttcggtggaattcagttgcatatgctccagtccccttaagactgcaagacgtctgccaggcgttcaagacgaccgcgaacgctgccatctatcaccatatcgcctgcgcgtattacgacgccggccattacagacttatcaattttgcaattcagcttaactttgcgtgacagacgtttttccatcgcagcggcaatcttagcctgctgttcgtcactcagtgcactcgcagaggacacttcaacgtcgacggtagactctaacgaggcacgcagttgaataaactgctgcagcacctcaggaagaaccagtaaacggccattctccgccataactcggataaagttctgtgcgggcacatcgagttgatcaccacaaacggcaataaacgttttcgacattgattcaggtgcaactgcacctgaaagcaattcggcaatctgttcattgcgcgttacctgagcggtaaacgccagcatttcctgccaatgttcaaccgcctggtgctcaacagcaaagtcaaaagctgctttggcgtaggggcgagctacagttacaaattcagacatcagcccctccctccttacagttcagcgaccagtttatcaacgatgtcgctgttagcagcttcatccacggaacgttcgatgatcttctcggcgccagctattgccaacatcgcgacttgcttacgcaactcttcacgagcgcgcttacgttcggcgtcgatctctgcctgcgcttgcgccacgattttgttacgttcctgttcagcttcagttttagcttcatcaaggatctgagctttgcgtttagacgcctgctcgatgatcacctgagcttctgctttcgctttcttcagttggtcggtcgcattggcttgcgctaagtccaaatcttttttggcacgctctgcagaagagagaccgtcagcaatttctttttgacgcttctcgatggcagccataattggcggccatacgtacttcatacaaaagatgacaaacaggacaaacgcgatggcctggccgaggattgttgcgttaagattcacagcacaatgcctctttcaaagttaatagtttggtgtagtttcacagtagagaaaatctctacttacgcgacagcaaacatcacgtacagacccagaccaacagcgatcattgggatggcgtcaaccagacccatgacgataaagaactgtgtacgcagcagaggaatcaggtcaggctgacgtgcagcgccttccaaaaatttaccacccaggatgccgataccgatcgcagcaccgattgccgctaaacccatcatcacagcggcagccatgtacagcagatccatattcaggttttccatgacagtctccagttatttcagttaaaacgcagtagtgttataagaaaatcagtgctcttcggatgccatcgagagatagacaatcgtcagaaccatgaagataaaggcttgcaacgtaataatcagtatatggaaaatggcccaaggcacacttaacaaccactgagaccaccacggcagcaggccagcaatcaggatgaagatcaactcacccgcatacatgttgccgaacagtcgcagaccgagtgaaaccggtttggacagcaggctgacaccttccaggatcaagttgactggaatgaataccgggtgattgaacggctgcatcgttaattcttttacgaagccgcctacacctttcattttgatgctgtagaacaggataaggatgaaaacacccaaagccatagacaaggtaatgcttacatcggcagtaggtaccacacgcagagccggtaatccaaagacgtgttcaccgatgaatggcagtaaatcgattggtagcaagtccatcatattcatcaggaagacccagacaaacacggtcaacgccagaggagcgatcactttgctcttgccgtgatacatgtccttcacgctgctatcgacaaaaccgataatcaattcaacggcggtctgcagtttacccgggacgccactggtggcacctgcagcaactttgcggaacaaaagcagaaaagctaaccccagcacgacagagaagaacaatgagtcaatgttcaacgtccagaacgatgcagggccagtagagtggggattgaccaactcgaaggtacgcaggtccaactgaaggttattcagatggtggcctatgtagtcccttggagtagagatttctcctgatgcagacatgatgcctcttacccttttttagttaaatacgataactgttttaagtacggtaaccgctaattacggccggtgccaatatctgcacaatcagcaccgataaataggttaaaccgagtgggacaaacgccgctttaaacagccccaaagccacaatcagtaaaattatcgtaatgataacttttaacccttcgccaatggcaaacgtccaagcaacacgacccggagccgctgtttttgcctgatggcggcaagcaaacagcatgaacatggcatttggcaaccaggccgccaaaccccctgcgaatgcagaagcactccattccaagcctttcaaaccgaaagcagcgctgagaacaacaaaagtcattaactgcaaaaacagcaactttcgcgcaattttcccgttgtaaagggatacaggcatgacgtttgttctctccctacccctcgatgggtatactgagtgacgtataaaactgcctttgccccagagagtcaagcagcaaaaaacgagcaaattatacggtgcacaccaacgaattcaatcgataagtagcgaaaaggtgaacaattatttaaattttcttctttcggactcttttcacaagaaatccctcggaataaatctcacattattttgtctgactattccactggctctcaataaagcgtgctgttgctcacagaacttaatattatctatttatatcgagaacgcttttctttgtctttaaccaaaagagccattaaatacatatataaatcaaagaattgaatttaaacacaccgtaaacatcttatctaccgaaccaaaaccttctgttgacattttcgataataatattgcaacaagttaaacacataaaaacgaagaataatgaatcaaagtagtttcattcgtgattatatccctgcgtccaacctgatatgtcaattcccggatacattcttgtaataatcaggtgaatatttacacatccaccgaattaattaactcagacaattaacccgggtgaaatacctaattccgaaaaactttattgctttttttgataaataacaaacttagtttggtttaaggataaccaaatgccgttcgccatctaactcaggaacctgtagtcgaatcacagactccaattcaataccttgtggcaaagtcgataattcatcatcagggcgtacgcctttcagcgcgtaaaaacgcccttcaggcctggctggcaggtgatggcaccaagacagcatatcgtccaaagaagcaaacgcacggcttatcacgccatcaaacccaggttggccgctaaagtcttccacacggctctgcacaggctcgatattagtcaaccccaactcatgttgtacctgacgcaaaaagcgcacacgctttccgaggctgtctagcagagtgaaatgtgaatcagggcgcacgatagccagaggaatgccaggtaagcccggcccggttccaacatcgataaaccgctgaccttgcaaatgagggttaaccacaatgctatccaggatatggcgaaccagcatttgttcagggtcgcggacagaagtcaggttataagccttgttccacttgtgcaatagctcaacatagccaataagctgctgtttttgttgatcgggtaacgaaattcccgcgcttttaagcaaggattctaattttttttgcaccacaatttcctctggccataagcggcgtagccagcgttaataagtcatcgaaaaagagatttgcctgcgttagcaggcggtcgctggtgcgctaagtctagcgcaccgcagaatacattcaggcactacgacgaagtaagccctgttttttcaaccagaccagcaagatagagattgcagctggcgtaacgccagaaatacgcgatgcctggccgatcgagtttggtttatgatcgttcagttttgccgtgacttcattcgacaaacctgaaacctgactgtaatccagatccgcaggcagcaacgtgttctcattgcgcagctggcgttcgatttcttcctgctgacgggcaatataaccctcgtattttacttgaatttcaacctgatccgcagactgaggatcgctcaatgctgggccgaatttgtccagtgaagtcagcatgcggtaatcgatttcagggcgtcgtaacaactcttcgccgttggcttctttggacaaaggcgctttgagcaacgcgttgatttgctcgatgttctctgagttcggatgcaccatgatatcgcgcagacgctggcgttctctctcgatttgctcgattttctggctgtaatgagcccagcgagcgtcatcgactaaaccaagcttacgtccagtttcagtcagacgcagatcggcattgtcttcacgtaacatcaagcggtattcagcccgagaggtaaacatgcgatagggttctttggtgcccaaagtgctcaaatcgtctaccagcacaccgaggtaggcttcatcacggcgcggtgaccagccttcgtcttcgttggcaaagcgacctgcgttgaggccagcaagcaagccttgagccgccgcttcttcgtaaccggtggtgccgttgatttgccctgcaaagaacagcccctgaatatatttactttccagagtcggcttcaaatcacgtggatcgaagaaatcatactcaatagcgtaaccaggacgaatgattcttgcgttttccatacctttcatcgaacgaacgatttgcatctgcacatcaaatggcaaactggtggaaatcccatttgggtaaatttcgttactggttaagccttctggctcaaggaaaatctggtgcgcattacgatcggcgaagcgcatgactttgtcttcgatcgaggggcaatagcgtgggccgatcccttcaatgatcccagcatacattgggctacgatcgaggttattacggataacctcatgggttttttcattggtgtaggtgatatggcaagccatttgctcaggatgctgtgaggcattcccgaggaatgaaaataccggcaccggatcgtcacctagctgcggtgtcaattggctgaaatcgatagttctggcgtcaattcgcggtggtgtaccggttttcaggcgattcactctcaacggcagttcacgcaaacgctgtgatagcgagatcgatggaggatcgcctgcacggccaccgctgtagttttccagcccgatgtgaatcttaccatccaggaaggtccctacggtcagcacaacggctttggcgcggaatttaagccccatctgggtgacagcaccgacaacccgatcgttttccacaattagatcttcgacaggttgctggaagatcatcaaatttggctgattttccaatgcggtacgcaccgcctgacggtaaagtacccgatcggcctgcgcacgagttgccctgactgcggggcctttgctcgcgtttagtatcctaaactgaatgcccgcctggtctgttgccatcgccatcaacccgccgagggcatcgatttcttttaccagatgcccctttccaataccgccgatcgctgggttgcaagacatttgccccagtgtgtcgatattgtgcgtcagcaagagggtctgacgtcccatgcgtgccgctgccattgcagcctctgtgcctgcatgaccaccaccgatgatgatgacgtcaaattgatctggataaaacatggtactgcacctcgccgttatgcgaatgatcgttggtttgccctggggtgggggattctactcaagtttagacgatcgaccaagtgccttgggatcgcccttaattaaaagaagatctttttatttaaagatctctttattagatcttctattaggatcgcgatcatctgtggataagtgattattcacaaataagatcatgggattaaggaggatcgtttgctgtgcatgatcggtgatcctattgcgtataagctgggatctaaatgccatgttatgcacaggtcacaatacgtacgaaggttgttatagggataactaccggttttaccctgcttataagcatagttatccacaatcgttcgcgtgatctttgagcgaattagagtaaattaatccactttttaacccattcctcagctggatcctcaggaatctcatgttgagtgacgtcgatctcgagtatttcaccgatccgtttagccccttttgcgatcaactgttgatcaagagagcggatcgcaccgcaaaaagtgtcgtactcggaactgccaagaccaacggctccaaagcgaacctgagataagtcgggttgttgttgctcgatttgttcaagcaaaggctgaagattgtctggtagatcacccgctccatgagtcgaggtcaccaccagccacaggccttgcggcgttaattcatctaattccgggccatgcaaagtttcagtggagaaacccgcttcttccagcttctcagccaaatgctcagcgacatactctgcgctgccaagagtgctgccactgatcaacgtaatatcagccataaacaacccaaccaaagtaaagaggcggtattgtactctgtgaatcagctgggatctacctgtggacaatatgggtatagttatttcttcattatggcacgatggtacgcataatggggttctgtagtgaaattaacgtctcggtagactggatctcatcaatagtctggatcttgttgataagtacctgttgcagcgcatcaatggatcgacacatgactttaataaacacgctgtagtgcccagtggtgtaataggcttctacgacctcttccaggctctccagttttttcagcgctgaggggtagtctttggcactttttaaaataatgccgataaaacaacacacatcatatcccaaccgttttgggtcaacgtgaacgcaagccgcggtaatgatgcccgcctgcttcattttctcgacccgaacatgaatagtgcctgggctaacggcaaagtttttggctaattcggcataaggtgtccgtgcattttccattaatgcgttcaggatgccgcgatcgagattatcgatctgatatatttcgctcatatttaccccctatttttatcgataatgcgtatttaaccgataaaaaatgaatgattaaaagtgaaaaggcaatattagttattggatattgaattataggtctgttctgttgcttaatcgatgtcaagccaaacggcatcctgataatcaagcattgagaaaacagccatgaaaaaacaatttatccagaaacagcaacaaatcagcttcgtaaaatccttcttttctcgtcagttggaacaacaactgggtctgattgaagtacaggctcctattcttagccgcgtgggtgatggtactcaggataacttgtctggttctgagaaagcggttcaggtaaaagtgaaaagcctgcctgatgcgacttttgaagtggttcactctttggctaaatggaaacgtaaaaccttaggtcgtttcgatttcggtgccgatcagggtctgtacactcacatgaaagctttgcgtcctgatgaagatcgtcttagcgctattcactccgtttatgtggatcagtgggattgggaacgcgtgatgggtgacggcgagcgcaacctggcttacctgaaatccacggttaacaagatttacactgctattaaagaaacagaagccgcagtgagcgaagagtttggtatcaagcctttcttgcctgagcagattcatttcgtacacagcgaatccctacgcgctcgcttcccggatctggatgctaaaggccgtgaacgtgcgattgctaaagagttaggtgccgtattcctgattggtatcggtggcaagttggcagacggtcaatctcacgacgttcgtgcaccggattatgatgactggacgtcgccgagcgctgaaggctttgctggtctgaacggtgacattattgtctggaaccccattctggaagatgcgtttgagatttcttccatgggtatccgtgtggatgccgaaacgctgaaacgccagctggcgctgaccgcagatgaagatcgcctgaaactggaatggcatcagtcactgctgcgcggtgaaatgcctcagactatcggcggcggtattggtcaatcccgtttagtgatgttactgctgcaacagcaccatatcggtcaggttcagtgcggcgtctggggcccggaaatctgcgacaaagtagaaggcctgctgtaattaggcgtagctttaaccgatagaattatcaggcagcccggcgttatcgccgggttatctattttgtttcctgtcagggtgttcttcgtccctattatagtttcctcttttttatcttctaactgtctattgctacttcaatctcttgcctttttaatcacttattcgccgaggcaataaagaatagttcggctatgccgatagtttctgcgattctggaacttatatcttatatacagtcgacctgacgctcagatgccctttcctgcgctaaggcaaataaggaaattgacgaagatggcatccaccttccgctcccttgctccatatatagaacaacgtgaacatttacgcttattactggcttcccatcaatttgatgagcttgattctctgctggatgcctcagctcagcgttggctggatagttcttctcaaccctttgattatgattggatcattagcacttttttcgatccggctgaggttgctacagacacgctttcaaacctgaatgcctggattaaacacaagcccatgtcttatcacgggcgtttgctgcatggctgttattgggaggcagcggcggcgcggattcgtacctccaacggcggagaatacgtctctaacgatcgctgggttggcgctcaactcgcgcgtgatttagggctgatctcctatctgcgggctatttcgctgcatgagcgcccggcttacgcattgcgtcggatgttacgtttaaccgcgtatctgggcgagccgcagtggttatacgatttggctcatgggcatgaaccaacaaattacgtgcaactccaggctgaaaccgagtcggaggtatgggaagcgggtctacgtcgtctgttggctgaaggcggcgatttggcgtctattccacaggcattgcctgggagtcttcctgcccgtcggtctgagaatgttaaaacctattggctcaacgcgaccttggctattcgtcctcaggacgtcggcgttcgcaatgaatatctttacttcctttatccgcgttggggcgggagccatgagcaaatggctgaatttatcgaagggccggtttgtgccgaactcagcgagcaaaacctcaatcttctttgggtcaccaaggcttgggatttcctcggttattccatttatttccctgataaagagcaaaccgacgatattgcttactgctgtgatgcgtttgagcaactgttagcgttggatcttgaagaagatcagcgtgcgagactgttgtatcaatatgctaatttcctcgcttattatggtaatcaggacggtgtctggcagccggaaaaaatgcagcgttgttacgatctgttagtgcaagcctggcaaatcaacccagctatagccaatccgcaaacggggctggatacattgatgagctgcattaatttcgcgaatatcaatgatagccataatttattaccgcaatggttggaacggttacaactatggggaaacgataaatacgcggtgatgttggcggggatcgccagtaaattcggtctgtacggcataaagaaaggccagtttaatcatcagaggttattggctcgagcagcacatctggactctgaagatgtggatgtcgggcaagccgctgcgaacctgtttggttcggtatctgaagaggctggaatatatctgctacaacaggcctgcgagtggggcgacacttcggcaatggcgacgttatcagacgtctacgccggtgtgttatcccgccagaatggccgtgatatggaagcctataaaaatagcgaattaaggacgtactggatggaacgagccgcagacggcggcgacgcgacctgtcagtacaattttgcctatgaaattattgaagataatgagcaactcagcccagagcagtatcagcaggctagagcattactgctaaatgccatgaatacgccgaatgtgcgccgagacgtatgggaacgttcggcgcgtcgattagcgacattattgatgtttagcgatattcaatatgatatggaactctgtctcgacgttgtgctgcctgcgctgtggagtgatgaagaagagccaaaccgcgtctttgctgccggttattatgcgctggcatttcatttgggcgcaggatgtaatcgtaacagctatctggcgaaagtctggctggaacgtgggttggaaatcgatcccgatgacagctatctagctgaccgcgctaccgaaatattccgctataaagagttgttgggcggcgttcgcgccaaaatggggttcggcaaagataaaaaactgatggatcaacgcggatataatctgacatttaatgagtaagccgcaggttcaggctattgcaggaaaaaatagtctgctctgtttcatcatcattacttctctatagtgaaaaccaatatcaatatatagagaaaatcagcccggttattaccaccagcgtcatttccgggctgtttgttatctggttggaggcagtttcagtctgctttcttatttatcgcctatcctcatcatagttagagatttaaaaaccatataaacaacatggaaggttaaatgctcgctatggctctatcacacgctattcgccactatttacatgctcgtccgcgttttttgctttccgtcggcgctggcgtagtcagctttttagtattgccgtctgatttgagcgttctgttccgtttgatggctagctggaatctaggggcgtggatatatctgatttgcctgtggttgctgatgttacgcactgagtcgacgcaggtcaggctggtagccaaagttcaggatcaaagcgccagcgccgtgctggctattgtctctatggcctgtttggtcagtattctggtgattctgtttgctctgagcaaagccaatacgttatccgatgggatgaaggcgctgaatctgttgctaacgggaactacgttatttgtgtcctggttgctgttgccaaccgcttttaccatgcactatgcccatcttttttatctggaaaggccaataccagaaaaaacgctgccgctgattttccccggggatatcaccaaacctacttattgggatttcctttatttcacctttaccatcagcgtggcgtcgcaaacggccgatgtgtctatcggcagctcagatgttcgccgtatcgttttgcttcagtcggttttatcttttatttttaatatgacgattctggggctgtcgataaacgtcggtgccggattgctgaattaagaatatacgtcgattaacgctgccagcggcgcatcaggcgactttttaatccggtatcaaagcgccagatatggtcgaatatccgcatgattcctggcttgccataggctgacatcgcaaccgcatggaaacgatgttggtgtgcttgctgttggattttgatgcgtcggattaattcttccggcaatcgctgcgccacaaaatcggaaataatcaccgcgtcggcgtcataccattctctgtcgtccattttggtcagcgttgcggataagcaggctgccagatctgttccaccgcgaaaacgctggctgaggaagcgaattgcctgttcgagtccgctggacgcggagagctcgtagtgaatgatttctgtcgcgaataacataatgtagcaacggcggttgtcttccaatgcgatgcgtagcaacgccaggcaaaaggctttagcgcactgttcattgaatccgcccatcgatccggaagtatctacgcagacaataaaagggccgcgcggctgttgatcgctatttttcaaactgactggccgctgtaactgctgttcttgccaggcatcgccctgtagccgataagtcagcaagcggcgttccaacaggcgacggtaaaactcgaattccagctcgctcatgcctagcatcaccagttcggtcggcagtaaacgtagaatgtcattactttgatgaataccactgacttcctcaggcacggcgtctggcattcgcaccatcactgagtaaggttcgaagcgagcatctggcgtcggtaatgccttagctgaacggctacgccccaactgttcggccagtttttgtaattccggctgttgctgcaaaaaatcaccgtactgcagtaataactgataatccccgcgctgtaattgtccctgactcatatcccacagtctgcctgcggcggtgtcgttatctgccagtatcggctccaaggcgccggtcagcgccagccgctgctgcaattcggccagtagctgctcacgttcctgttctaacagctggtggtgcagcgtaacggtttgtaccgttaaactaatgcgccagcgttgtaaaaacagcgtttgcaggctatcgccgtggggaggattattggccagatcggcggcttccagcatggatcgcgcctgagtcgcgaaaggagaatggatcttctccatattttccgccacttcccaaacctgctgataaaaggtcacgctgtcctgaagttggcagcgctgatagagcgtaaattcgttcgccagcgccggtggcacctttgcttcctgaattcgttgctgcagtttgagtttccagccgggaatatctttcatcagggcgcgtttcattcgagggaacttctcaaagaaaatagccagctgtggcgcggccaacagaccgatcaccagttcatctatcagttggttttcactgatagacagcagcatatccaacgttgccaagctgagcacggctattgcccacgcattttttggtgttgctgtttcacctgctcagcaacttgtagcaagctggcttcaattttcgccagccagcttgaaggtgtgaacaggcagggttggtgctggctaaactgtctgcgtttttctgagagacgaatttccaactcactcatttgagttaataacgattctggtacagctccggcggattcacccggcagagaaacaaccgcgccctgacgactaacgtccaaaataaccaggtgctggcggtcgtcaatttcggcatcaatgctctgtgcgaaaccgacgccattcagtttggcacgcagtacgccgcctttgtttagccattgcaccagagcgtcccgctcgatttgcagatgattgacttgaatatcgtgcaaattcagcggtttttgtaggaaaaatgtcaaagttgcatcggtcagattttctggcaaagaatattggggcttacggctgaatatgccgctttgctttatcaacgtgagcgcttgccgatcgctttgctgttgctgatgttgcagccattgagcctgaatatgttggagctgagtgataagcagctgttgctgatagctttgctcacataacagttgttccaactgctgctggagtagtttgagagagttaaggtcatgccacaggcaatctttcagtaaaatcatatcgataggcgcaatggcatcgcgaccgctgaaaaaggcgctggcttgcagcaagcgcagggcttttttccaacgtcgatcagaaacataaggcgcctgctctaaggcacctaagcgttgacgtaattgaaaaataagttcgaaacaattatctggcagcgtaattttatctatctgtggctgccactgatgaaactcttcatcggtgatactaagattttccgccaccggattatggttttcgttttgacgcgttaatagcaatgagcggaagttttgtttttcctgcactcgatctaaccacaggcgaattagcatacggtcataaagagcctccaaactgctatcggcatcgggcagttcgttggatgccgtaaccaacagacgcattggaatgctttcttctttgtcaccgttgcgaaaacgccgttcgttaatcgctgtcagcaaagtattcagaatcgccgggccagctttccagatttcatccagaaaaacgatttccgcttccggcaaataaccgtgggtcattcgctggtaacgcccctcttctttcagtgcctgaatggatagcgggccaaagacctcttccggcgttgaaaaacgcgtcatcaggtattcaaaagccctggcattacggaaggcaaacttcaggcgacgggcaatcagacttttagcaattccaggtgggccaagtaaaaacacgctttctccgctcaacgcggcgagcaggcataagcgtatcgcttcctgcctttcatacagtccggtttccagcgcattacttaaacgggatattctgtctgctaattgcgttgattgcgccataattatcctaaacggtcgatgcgtgaactgatatttacccaagaggtagagattaaaccactttttttaatgttatagcttcttgattagtaaaatttttatgttattgatgatgcttacctcatcatttattgccttctttatctcccgatttaagggtaggcaatcagtttaaatcgtgcatactgtgcgccttttggtgagcgtcaagggacagagaaccgtcggttgggttcttaaacgcacgcatcagcttatggatgttctagcaaaaagaaacaaattatgagcacagaacataaacgatctttatcggcagtaaccctggcagcaataggggtagtgtacggtgatattggtaccagtcctctttataccttaagagaatgtttttctggtcattatggttttgacgtgcgtcctgacgtcgtatttggttttctctctctgatattctggatgttaatcctgattgtctcgctaaagtatcttacctatgtgatgcgagccgataacgccggtgaaggcgggattttaaccctgatgtctctggccggcagaaacacgtcctcccgcgcaacgtcgatattggtcatacttggcctgataggcggcagttttttctatggcgaggtcgtgatcactcccgcgatctcggtgatgtcggcgatagaaggtttggaaatagccgcccccgccctcgatccttatatcgttccctgttcaattgccgttctgactttattgtttgtcattcaaaaacacggtaccggtagcgtgggcaaactctttgcgccggtcatgttagtttggttcctgacgttagcggtgctgggtattcggggcattatggataacccggaagtgctcaatgcgatgaatcctaagtgggcgctggccttctttgcggaatacaaaacggtttctttctttgccttaggtgcggtagtgctggcaattaccggcgtagaggcactgtatgcggatatggggcatttcggtaaattccctattcgtctagcttggttcaccgtggtgctgccttcgttggtgctgaactactttggtcagggcgcactgttgctgaaaaatccggaagcgataaaaaaccccttcttcctgctagctcccgattgggcgctgattccattgttggttctggcaacgttagcgacggttattgcctcgcaggccgtgatttctggcgtattctccctgactcgtcaggcggtgcgtttaggctatttaccaccaatgcgcattatccatacttcagaaatggagtctggccagatctatattcccgtaattaactggacgctatatatcgccgtagtattggtgattatcggcttcgaacgttccagtaatctggccgcggcctacggtattgccgttaccggcaccatggtattgaccagtattctgttctgcaccgtggcgctgaaaaactggcactggaatcgggtattcgtagcctgcttattgatgatattactgatcatcgatatcccgatgttctccgccaacgccttgaagctgttctccggcggttggttacctctgacgctgggtctggtgatgttcatcatcatgaccacctggaaaagcgagcgtttcagcttactacgtcggatgcatgagcacggtaattctctggaagcgatgatcgcctcactagagaaatcgccaccggtgcgggtttcaggtacggcggtatatatgtcgcgtgccgtgaatgtgattcctttcgcgctattacataacctcaaacacaataaagtgctgcatgatcgcgtggtattgctgactctgcgcactgaagacgcgccttatgtacacaacgttcgccgtgtgacaattgagcagctctcaccgaccttctggcgtgtggtggccagctacggctggcgagaaacgccgaacgtggaggaaatcttccaccgctgcggtctggaggggctgccttgccagatgatggaaacctccttctttatgtcccacgagtcgttaatattgtcgaaacggccttggtatttgttcctgcgcggtaaactgtttatggctctgagccgcaacgctctgcgcgcgccggatcagttcgaaatcccgcctaatagggtgattgaactgggaactcaggtagaaatctagttactaaggccgtcattccgacggcctttttacttcttgtactgatacgcactgactttttatccgcagattttccctaccacttattttcccgaagtatttagccagtttattcatccttgtttaatagtgcagcgaaacgtttcgatggcgatcacaaattcaccacattaggtttgccttctgctgtcttttttttaaacttatccatcagcgaaacgtttcgctgtcggagcaaaaaatgaaaaaaggcgtattactgaattctgatatttccgcggttatctcccgattaggtcatacggatcaaatcgtcatagcggatgctgggctgccgattccggccagtaccacccgcatcgatttggcgctaacacagggtgtacctggcttcctccaggtgctgtcggtggtgacgcaggaaatgcaggtagaaagcgctattttggcggaagagatcgcgaagaataatccgcagctccatgaagctttgctgacacaacttaaacaacttgagcaacaccagggaaactccattgctttgcactatgtcagccatgaggctttcaaagagcaaacaaaacatagccatgcggtcatccgtagcggggaatgttcaccttttgcgaacgtgattctctgcgctggcgtaactttctgaggcatttatgcaacctttgctgcaattgaaagggattgataaagcctttcccggcgtcaaagcgctctctggcgctgcactcagtgtttaccccggacgggtaatggcgctggtgggtgaaaacggcgcagggaaatcgacgatgatgaaagtgctgacgggcatttataccaaagatgccggtagccagcattttctcggtcaggaagtggtattcaatggtcccaaggcctcgcaggaagcgggtattgggattattcatcaggaacttaacctgattccacagctgaccattgccgagaatatctttcttggtcgtgaattcgttaaccgttttggcggcatcgattggaaaaagatgtatgccgaagcggatcgcctgttatcccgcctgaatattcgctatagcagccatcgtttggtcggtgagctttccatcggcgatcagcaaatggtcgaaattgccaaggtgctgagcttcgaatccaaagtcatcattatggatgagccaacggatgcgctgacagacacagaaaccgcctcgctatttaacgtaatcaacgagttaaaagctgaagggcgcggcattgtctatatctctcaccgtctgaaagagatttttgagatctgcgacgatgtgacggttttccgcgacggccagtttatcggtgaaaagccggtaagcgagctggaagaagatacattgattgaaatgatggttggccggaagctggaagaacaatatccacgcctgaatttgcctttgggcgatgtgcgcttgcaagtgaaggaactttgcggcccaggggtgaacgacgtcagctttacgctgcacgccggtgaaatcctcggtgtggccgggttaatgggcgcagggcgtactgaactgatgaaaatcatttacggcgcgctgccgcgtaaatctggttatgtgatgctggatggtcgtgaagtggtgacccataccccgcaggacggtttggctaacggcattgtttatatttccgaagaccgtaagcgtgatggtttggtgttgggaatgtcggtcaaagaaaatatgtctctgacggcattacgttattttagccgcagcggcggatcgctgaaacatggtgaagaacagcaggccgtggctgactttattcgtttattcaatattaaaacgccatcaatggaacagcctataggtttgttgtccggcggcaatcagcagaaagtggcgatagcccgaggattaatgactcgacctaaagtcttgattctggatgaacctacccgcggtgtagacgtaggggcgaaaaaagagatctatcagttaatcaaccagttcaagcaagaagggctcagcatcattctggtttcttcagaaatgccagaggtgataggcatgagcgacagaattctggtgatgcatgaaggtcatttaagcggtgagttctctattgaacaggccactcaagaagtgttgatggcagccgccgtcggcaagcgtgatttatttatgagtagtagcgcgcaaagcaggagtaatcagatatgagttcccagactatccagaccaaacgctggttcagcaaagagtggctactagaacaaaaatcgctgattgcgctgctggtgctgattgccgtggtttcgtccctcagcccgaatttcttcacgctaaataacctatttaatattctgcaacagacctcggtgaacgccattatggcggtagggatgacgttggttatcctgacgtcaggcatcgatctttccgtgggttccttactggcgctgaccggcgcagtcgcggcatcgattgtcggattggaaatgaacgcgctggtggccgtgggtgccgcgttggcggtaggagcctttgttggcgcctgtacgggcgtcatcgtggcaaaaggcaaggtgcaggcctttatcgccactttggtgatgatgctgctattgcgcggcgtgaccatggtgtataccaacggtagcccggtgaataccggatttaccgatgccgccgacgcctttggctggttcggtattggccgcccgttagggataccaacgcctatctggttgatggctatcgtttttgccggtgcctggtacatgctgcaccatacccgtttaggccgttacatttatgctctgggcggcaacgagtctgccacccgtttgtccggtatcagcgttgataaagttaagattattgtttactcactgtgtggcttattagctgcactggctggcattatcgaagttgcgcgtctatcttcagcccagccaactgccggtaccggctatgaactggatgcgattgctgcggtggtattgggcggcacaagtctggcgggaggcaaaggacgcattgttgggacgctgatcggtgccctgattcttggcttcttgaataacggtttgaatttattgggtgtctcctcctattaccaaatgatcgttaaagcagtagtcatcctgctggcggtattggtagataacaaaaagcagtaggcgacgttgcaacaataacgcctgcaaaattaacgatgctctctccctacaggaactgcgaccatgaaaatgaaaaaactggctactttgatctctgttgttgccctgagcgccacggtgagtgccaatgcgctggcaaaagacacgatcgcgctggtagtttccaccctgaataatccgttctttgtttcaatgaaggatggcgcacaaaaagaagcggacaaactgggctataacctggtggtgctggattcacagaacaacccggcgaaagagttggccaacgtacaggatctgacggttcgtggcaccaagctgttactgattaacccaactgactcagatgcagtgggtaatgcgattaaaatggcaaatcaggccaaaattccggtaatcacgctggaccgtctggcttctaaaggcgaagtcgttagccacgtcgcttccgataaccgctttggcggtaaaatggccggtgacttcatcgccaaaaaactgggtaacgatgccaaagtgattcaactggaaggtatcgccggtgcttccgctgctcgtgaacgtggcgaaggctttaaacaatcgatggaacaacataaattccaactgttagccagccagccagcagattttgaccgcaccaaaggcctgaacgtgatgcagaatctgctgaccgcacatccagcggtacaggctgttttcgctcagaacgatgaaatggcgctgggtgcgctgcgtgcattgcaaactgcaggtaaaaccgatgtattagtggttggttttgacggcactgacgacggcatcaaagcggttgaaggcggcaagttgggtgcaactatcgctcaacgccctgaccaaatcggcgctatcggggttcaaactgcggataaagtgctgaaaggcgaaaaagtacaggccatcatcccggttgatttgaagttagtgaccaaacaataaaagcagagaatttaggtatcacgccgccgcagcaatgcaatgttagcggtggcgttatctacaaaggaatagatgcgatggaaacaggtaagctagtggttcttggcagtatcaatgctgaccatattctgaatattgagcaatttccacgtccgggtgaaacggtgatcgggaagcagtatcacgttgctttcggtgggaaaggtgccaatcaggcggttgccgccggccgcagcggagcggatatcgcatttattgcctgtgtgggtgaggatgatattggtgaacgcgttcgtcaacagttggctaaagaccgtatcgataccacgccggtggaagctatcgcaggcaaaactaccggtgtagcactgattttcgtcaatggagagggggagaacgttatcggcattaatgccggagcaaattctgccgtgacacccgaataccttcaacgttatcagcagcaaattattgatgcgcaagcagtattgatgcagctggaatctccgctggaaaccgtgatagccgctgcgaaactggcgagagaaagccagacgcaggtgattctgaatccagcaccggcgcgcgagctaccggatgagttattacagctggtggatatgattacaccgaatgaaaccgaggccgagcgcctgacaggtattcatatcgaaaatgaggaagacgccaatctggcggctcgggcattacatcagaaaggcattacgacggttattatcaccttgggtagccgcggtgtatggcttagccagcaaggtcagggcaaactgatgccgggttttaaggtgaatgcggtcgatactattgccgccggtgatacttttaacggcgcactgcttacagcgttattggacggtcaggaaatggcatcggcgatacgttttgctcatgcagcggccgcgattgccgtgactcgccctggcgcacaaccctccattccatggcgggccgaaattgatgccttcttgcaaaaccagaggtaattttggcgaccatgaaagatgtcgcccgtttggcgggcgtttctacctcgacggtttctcacgtcatcaacaaagatcgttttgtcagtgaagcggtacgcgacaaagtcgttgccgctattaagcaactcaattatgccccttcggctttggcgcgtagcctcaagcttaatcaaacccgcactattggcatgttggttacggccagcagcaacccgttttatgccgaggtagttcgcggcgtggagcgcagttgctatgagcgcggctacagcctgattttgtgtaataccgaaggcgatatcgatcggatgagccgtagcatggaaaccttgctgcaaaagcgcgttgatggcttgctattaatgtgtaccgaaaatcatcgcccgtctcaggatgttctccgctgttacccttctttacctattgtcatgatggattgggctccttttgaaggtgtgaacgacaccattcaggataactcgctgttaggtggggatatggccacggatttcctgattgccaaaggctataaacgcattgcctgtatcgccggaccacaggataagactccggccagagaacggctggaaggttaccgtcaggcgatgaagcgtgccggcttgccgatcttggctggatatgaaattgccagtgactttgagtttgcgggtggtttggaatcaatgaagcagttattggctttgcccgaagtgccggaagcagtatttactggtaatgatgcgatggcagttggggtttatcaggcgttgcatcaggttggattatccatcccgcaggatatggcggttattggttacgatgatatcgagatcgcccgttatatgacgccgccgcttacgactattcatcagccgaaggatgatttgggtgaattggccatcgatacattaattcatcgtctgaataatccatttgcagaaccgcagattctcacgctcacacctgagctggtggagcgtggttctgttgctcagcgctagactttgcttttccgcgcgctgcggcctttaatcaggttatcgccatctttaggtttgagtagcaagaacactagggatgaaaccaatgtcactgcgcccatggtaataaaggtgtagtggaaatggtcgatgtgattgccaaacggtaattcctcgtagaaacgcagtacggcggcgctgatagcgacgccaaagctgatggaaagctgttgagtgacggccagtacgctattaccggagctggcgttgttatcggtcaggtctgccagcgtaatggtattcatggccgtaaattgggtagacatcgccattcccaaaatgaatagtggcacgatcattagccagacagacatgcccggcgtttgtaatgaaaacaatccaatcagtgtgccaataatcaacgtaatgctcaccagcacctttctatagcccaaccagcgcaaaacctgagtcacggtagattttgccatcattgagccgatagccgtcggcgccatcatgcaaccggcaatgatggccgagtagccaaagccaacttgtagcatcaatggcatcaggaaaggtacacagccagttcccaatctggaagcgatattaccggctatcccgacggagaacgttctggttttgaatagaggtaatccgattaatggatttgggtgtcccttggcgtggaaaatataaccgactagcaggagcaatcccccaagcatcatcgagggagaaagatagcccgacacttccgctttccccatcatctccagactgatagaaatcatgaccaaactaaagccgaacagtaggaagccactaatatcaaaggctcgcttaggcatagtgaaattaggcatgtatttcagcgcataaaaaatgcctaacaggccaatggggatattgataatgaaaatccaatgccaactggcgtaagtcaccagcaggccacccagcaaggggcccataatggggccgactaaaccgggaatggttacgaaatttagaaccggcagtaattcactgcgcggataagcgcgtaataatgccagtcgcgcgactggcatcatcatggcgccgccaatgccttggataacccgcgaggcgaccagaaatgagagggaacctgataacgcacataataaagagccaaaggtaaacagcgagacggcaatgataaaaattcgccgggtgccgtagcgatcggctaaccagccgctgactgggatcagcatagcgacggttagcgtgtagctgataatggcagactgcatagttaacggcgagcgattgaggctttcggctatcgcgggaagggctgtgtttaatattgttgcgtccagcgcctgcataaagaaagccatggcggcaatccagggtaagccggccatgctacgagcagatttaatcattctatttcctgatggaattcgttattaacaatcctctcttctatatatagataacatgtgattacacactccgtcagtttttgtcttgtaataatacctgacaggcaatgcaggcaccctgactgtcgctggcaaggatggtatcaacgatagattggtggtgttgcagctttatcacttcatcgccggtaatagcacggaagtagctgtgatataccgaactgaacaaattggcgaacgaagtcaggaagggattaccactggcttcgtagatcagttgatgaaattgggtatccacctgaatccagcgttcacgatcaaattcacggtgcagcgcctgcatttctgccatcaatatagccaattgctgtttttgcgcaggattagcgttaaccgcggccaaagcgcaggcctgtggctctaacgcggttcgtaccaaaataaagtgctgcatcacctgatcgaagttttcacgggtcatccaccaggtgagtaactcctgatcgagaaaattccagttggactgcggcataatgcgcgtaccaatccgtggccgtggcaacaacatccctttcgccgctaacattttaaccgcttcacgtactgcagtgcggcttacgccgaactgttcgcctagttctatctctccgggcagtatagaaccggctatatattcgcccgccaggatacgctggccaatcttttcagctaataaataggaaaggttgcgttgggcggcttgttgttgggcgttaaattgcatggtgatttgtcctggctaacttcttatccttctattttactctactgtttcactctggtattggctgtttaactgaaaagtagtagaaaagttatccatttccgcactttttgatgaaaaaaaagccggttggaaaattatttgaaattaggggttgcagcctgtcaggaactccctataatgcgcctccactgaccgggaacaacgaaacaaacttcgccgggtcaggaagtgttaagcaggcggaaacgccggttcttaaaacgaaagttgaaaagaaaagcttgacacttcagcgggaaagcgtattatctgcctcccgcgttaccgtaagattcgccgcaagcgaacgggtaacgaacgctctttaacaatttatcagacaatctgtgtgggcactcgcaagacgatatcaaagcctgtttcggcaggcagaagaaatatcaagtcttgaagagtgaccaaagcagtaaacatttgaacttcggttcgaatgcatatttgcagaaagtaatctttgagcatcgctacttcggtagcaaatcaaacaaatcttaaattgaagagtttgatcatggctcagattgaacgctggcggcaggcctaacacatgcaagtcgagcggcagcggaaagtagcttgctactttgccggcgagcggcggacgggtgagtaatgtctgggaaactgcctgatggagggggataactactggaaacggtagctaataccgcataacctcgcaagagcaaagtgggggaccttagggcctcacgccatcggatgtgcccagatgggattagctagtaggtggggtaatggctcacctaggcgacgatccctagctggtctgagaggatgaccagccacactggaactgagacacggtccagactcctacgggaggcagcagtggggaatattgcacaatgggcgcaagcctgatgcagccatgccgcgtgtgtgaagaaggccttcgggttgtaaagcactttcagcgaggaggaaggcatttcacctaatacgtgaagtgattgacgttactcgcagaagaagcaccggctaactccgtgccagcagccgcggtaatacggagggtgcaagcgttaatcggaattactgggcgtaaagcgcacgcaggcggtttgttaagtcagatgtgaaatccccgagcttaacttgggaactgcatttgaaactggcaagctagagtcttgtagaggggggtagaattccaggtgtagcggtgaaatgcgtagagatctggaggaataccggtggcgaaggcggccccctggacaaagactgacgctcaggtgcgaaagcgtggggagcaaacaggattagataccctggtagtccacgctgtaaacgatgtcgacttggaggttgtgcccttgaggcgtggcttccggagctaacgcgttaagtcgaccgcctggggagtacggccgcaaggttaaaactcaaatgaattgacgggggcccgcacaagcggtggagcatgtggtttaattcgatgcaacgcgaagaaccttacctactcttgacatccacagaacgtagcagagatgcttcggtgccttcgggaactgtgagacaggtgctgcatggctgtcgtcagctcgtgttgtgaaatgttgggttaagtcccgcaacgagcgcaacccttatcctttgttgccagcacgtcatggtgggaactcaagggagactgccggtgataaaccggaggaaggtggggatgacgtcaagtcatcatggcccttacgagtagggctacacacgtgctacaatggcagatacaaagtgaagcgaactcgcgagagcaagcggaccacataaagtctgtcgtagtccggattggagtctgcaactcgactccatgaagtcggaatcgctagtaatcgtagatcagaatgctacggtgaatacgttcccgggccttgtacacaccgcccgtcacaccatgggagtgggttgcaaaagaagtaggtagcttaaccttcgggagggcgcttaccactttgtgattcatgactggggtgaagtcgtaacaaggtaaccgtaggggaacctgcggttggatcacctccttacctaatgatacgcattgcgcagtgtccacacagattgtctgataatagtaatgagcaagagcacctgttgatgtcgtgagtttcgactcatgatgacacgagaaacgattaagtttttgatttagtcggaatttcctgtgtccccatcgtctagaggcctaggacaccgccctttcacggcggtaacaggggttcgaatccccttggggacgccatccgataatgagtgaaagacattatcaactgaatatcttaaagatgactttaacgagtcgtgtttaagatattgctctttaacaatctggaacaagctgaaaattgaaacactgcagctaaaacttgtctctccgtagatttaccgagacaaggagtcatctgcaggtagagtctctcaataatcgcagcacgatgatgtcgaaagacaccttcgggttgtgaggttaagcgactaagcgtacacggtggatgcctaggcagtcagaggcgatgaagggcgtgctaatctgcgaaaagcgtcggtaagctgatatgaagcgttacaaccgacgatacccgaatggggaaacccagtgcaattcgttgcactatcgttagatgaatacatagtctaacgaggcgaaccgggggaactgaaacatctaagtaccccgaggaaaagaaatcaaccgagattcccctagtagcggcgagcgaacggggaggagcccagagtctgaatcagtttgtgtgttagtggaagcgtctggaaagtcgcacggtacagggtgatagtcccgtacacaaaaatgcacatgctgtgaactcgatgagtagggcgggacacgtgacatcctgtctgaatatggggggaccatcctccaaggctaaatactcctgactgaccgatagtgaaccagtaccgtgagggaaaggcgaaaagaaccccggcgaggggagcgaaatagaacctgaaaccgtgtacgtacaagcagtgggagcaccttcgtggtgtgactgcgtaccttttgtataatgggtcagcgacttatattttgcagcaaggttaaccgtataggggagccgtagggaaaccgagtcttaactgggcgtctagttgcaaggtatagacccgaaacccggtgatctagccatgggcaggttgaaggttgggtaacactaactggaggaccgaaccgactaatgttgaaaaattagcggatgacttgtggctgggggtgaaaggccaatcaaaccgggagatagctggttctccccgaaagctatttaggtagcgcctcgtgaactcatcttcgggggtagagcactgtttcggctaggggtccatcccggattaccaaaccgatgcaaactccgaataccgaagaatgttatcacgggagacacacggcgggtgctaacgtccgtcgtgaagagggaaacaacccagaccgccagctaaggtcccaaagtcatggttaagtgggaaacgatgtgggaaggcatagacagccaggatgttggcttagaagcagccatcatttaaagaaagcgtaatagctcactggtcgagtcggcctgcgcggaagatgtaacggggctaaaccatgcaccgaagctgcggcagcgacacttaggtgttgttgggtaggggagcgttctgtaagccgttgaaggtagtctgtgaggactgctggaggtatcagaagtgcgaatgctgacataagtaacgataatgcgggtgaaaaacccgcacgccggaagaccaagggttcctgtccaacgttaatcggggcagggtgagtcgacccctaaggcgaggctgaaaagcgtagtcgatgggaaacaggttaatattcctgtacttggtgttactgcgaaggggggacggagaaggctaggctagccgggcgacggttgtcccggtttaagcgtgtaggggggtgttcctggtaaatccggaaaaccatcaaccctgaggcgtgatgacgatgcaccacggtgcagaagtagttgatgccaagcttccaggaaaagcctctaagcatcaggtaacattgaatcgtaccccaaaccgacacaggtggtcaggtagagaatactcaggcgcttgagagaactcgggtgaaggaactaggcaaaatggtgccgtaacttcgggagaaggcacgctggcgctaggtgaagagacttgctctcggagctgaagccagtcgcagataccagctggctgcaactgtttaataaaaacacagcactgtgcaaacacgaaagtggacgtatacggtgtgacgcctgcccggtgctggaaggttaattgatggggtcagccgcaaggcgaagctcttgatcgaagccccagtaaacggcggccgtaactataacggtcctaaggtagcgaaattccttgtcgggtaagttccgacctgcacgaatggcgtaatgatggccaggctgtctccacccgagactcagtgaaattgaactcgctgtgaagatgcagtgtacccgcggcaagacggaaagaccccgtgaacctttactatagcttgacactgaacattgagccttgatgtgtaggataggtgggaggcatcgaagcgtggacgccagtctgcgtggagccaaccttgaaataccaccctttaatgtttgatgttctaactcggccccataatctggggtgaggacagtgtctggtgggtagtttgactggggcggtctcctcccaaagagtaacggaggagcacgaaggttagctaatcacggtcggacatcgtgaggttagtgcaaaggcataagctagcttgactgcgagagtgacggctcgagcaggtacgaaagtaggtcttagtgatccggtggttctgaatggaagggccatcgctcaacggataaaaggtactccggggataacaggctgataccgcccaagagttcatatcgacggcggtgtttggcacctcgatgtcggctcatcacatcctggggctgaagtaggtcccaagggtatggctgttcgccatttaaagtggtacgcgagctgggtttagaacgtcgtgagacagttcggtccctatctgccgtgggcgttggaagattgagaggggctgctcctagtacgagaggaccggagtggacgcatcactggtgttcgggttgtcatgccaatggcattgcccggtagctaaatgcggaaaagataagcgctgaaagcatctaagcgcgaaacttgcctcaagatgagtcttccctggggctttaagccccctgaaggaacgttaaagactatgacgttgataggctgggtgtgtaagtgcagcgatgcattgagctaaccagtactaatgatccgtgaggcttaaccttacaacaccgaaggtgttttagagagcgttttgattttcagcattgttaacagattggattgactggctgtgtgatgtaaatcacgtggcgggttgattaaaacagaatttgcctggcggcaatagcgcggtggtcccacctgatcccatgccgaactcagaagtgaaacgccgtagcgccgatggtagtgtggggtctccccatgcgagagtaggacactgccaggcatcaaatcaagccaagaccccatgccaaaagcgtggggtttttgctatggaaaaaagacagacgcgaggcggataaaagtcattgccgccctcgaaccgagcctcctgcgattgcggggggctttttgcgtttaagggcatgggaacccccgggaatgccgggcgttgaaggcgtatatggcgattttcattccatagggggcggcttatccggtaaattgcgccgccgttgacgttttcaggcagtaaattcgcagcattttcaggcagatacagtcactcaccgggcttatattttattaaaaagccatgtaaccaacgaaccaggtcggttttatcggaaactcatcccccattaacgggtattcacactcggcggtagctcaagagccaggcttgcatccggtggggcgtaaggggataaaacgtgtcgccagtcgggatgctgaggcctctgatacactaccggcctcactgcgaagagtaacagacagaagatttttaactgctggttaaaactctggcggtgactgacgagtcaggctacataccaaataaccttttttatcatctagattgttgtgttgttaacttgcaatgagggtgattttgccgaagttttaggcaatgtgatgcaaccctaccccaaattagcccagttatcagggtgttataagatgctattaacggtgtgaataagtggctgtttgaaaagtggttttagcggcaagagtgtgggctgtcaggcgcaagcgtcctgttgaaaagtcagctaagtcatcatcttcgagccaacctaatggcgtgaccagctttatactatcagcagcagttaagactgacttttcagccaggaacagatgaaatcagcaatatgatagggttgattaatatccaattgcggtaaatctgtaggtgccggttcatcgcttgctagcgcaataacatgcttatcgattactccggtaaaaggttttcctacagccgctcgatatagggcgatcttattgataggctcatgtctgaacccctcgaccaatacgagatcgatactgtttgcatccannnnnnnnnnnnnnnnnnnnnnnnnnnnnnnnnnnnnnnnnnnnnnnnnnnnnnnnnnnnnnnnnnnnnnnnnnnnnnnnnnnnnnnnnnnnnnnnnnnnnnnnnnnnnnnnnnnnnnnnnnnnnnnnnnnnnnnnnnnnnnnnnnnnnnnnnnnnnnnnnnnnnnnnnnnnnnnnnnnnnnnnnnnnnnnnnnnnnnnnnncaccgcaatgataaattggtgtaagttcgctgagattgtccgattgtaaaaatggcccgattccgcaaagaatcaggccatttttttaccccaaaatcaggctaatgaatcactacaggctgcccggcgtgcgggtattattgcgagttggcgtgttcacgctgcggccagcgcgccccagcgtttccattcgaacctggaacggtgggaacggcagaacaataccatgctcgcggaagccttccagaatcagttgatgtatttcgtggcgcattggcaagcgatgaagcatttcggcggcatagatacgcaactcgaaaatctgaatgccttgctgtagatccatcaggaatgcttctggcccagggttatccaagaccatggaacaacgtctggcggcggtaagcagcagttcggtcacttcttcgctattggcttcggccggagccggtactgttaagaccacgcgagtaataggatcggacagtgaccagttaatgaactgctcggtgataaaggccttattcggcacgataatctctttgcgatcccagtcggaaatggtggtggcgcgggtattgattttggttacgctaccggttaaatcgcgaatagttacggtatcgccaatacgaatcggtttttcaaatagaatgatcagcccagagacgaagttggcaaaaatttcctgtaagccaaaacctaaccctaaaccgagagcggcgaccagccattgaaatttcgcccattcaatccccagtagtgaaaagcctaataggccaccgaacaaaatcaccagatatttggttattgtcgaaatggcataaccggtgccgggcgtcaggtccagatgctgtaatagcgccagttccagcagggcaggcaggttccgcactaactgagtcgtcacgattatgaccagaatggcgatgatcagcgatcccatagtgatcggctggatggattcgacgccgttgatagtcgaagaaacatcccataggcgaatattttccaggaaaccaaaggctgaatggatctctgaccacaggaagatcactgaaaccagcgcgatcatagtgagtatggaacgaaccagacgcagcgattgagcgctgatcacgtccagatcaataaccggctcatcaacatcgaccgacccctcggaactattcgtatgcggcgtatcttcttcacctctggcacgctgcgccaggatatcggcccgacgctgtttagcacggtcaaaggcaatacggcggcgctgaatcagcatccagcggcgaataatatggtaaatcaccagcaggaagaaccagatggcgacggaggtttccagacgagccagcagcgcctgagacgtggtgagataccccatcagcgaggccagcgcggcaatcagcggagcggaaagcagcagcccccacagcgcctgattgatcttattctctcccgaaccttttttatccagatacagcggaataccggcacgtttcagactgttggtgaccagacttagtgcgatacacaacaggacaaagcacagtcggcctaatgtgccggcgaattcgcggtcgttataattctcgaaggttatcaacgccatcatcaacggaataatcagccataccgacatacggtaaaagcgcatcgcacgcgcgacctgatctggcgcccagcggaaatgggtgataaacaggccgtgaggatgagcaaaagcggcgctgatcataaacacccacagtaccggaaccgtggcggtcactgcgttgccaatggcaatcgccatcgggtaggaccacgcgttttgcaacccgtaacccagcgccgcccagagcacaggaagcggcaaggccaccagaatcgaccagaaaacggtgcgcagcgttaatgaaaactgatcttgcgtaactttgccgacccggctgctggctcgctccaaaaacgcatgataatggcgacgggagctgacgctaaagctgacaaacagcagcgcggcgataatcggaatcagcgtttcctgactggtcatcatcatcacaaaggcaccgctgagctgggataaggtatccagcgaaagcaggcgcgtcaggtcacgagcgacatcgatcggataagacaaggaaattgggctaacgtccgcaacccaaaacagatagcggtgggtcgcctcgcggatttcattcagggcatcaaccaattgactattggcgactttcagcttggtcagttcgagaatctgcgtgtcatagccagaaagcagtgaatttagcagttctcgctgggtgcgtagctgagcgtccataatgcgttgttgctgaaccgtcagcggcgtaccgtcgtcctgcgtcgctttggttcctttttgctgctgctccagcatcccttcataggtcagacgctgaactcgaagctgagccatatctctatctaactgttgagattttggcatttcaggcaagcgggctacgtgcgctcgtagggtttcccccagtgcagtagaaatacccagccattgcgcctgttcgcgaatggtgctgagagtctgccgaactcgcagagtgtctgccgccgcctgacgttgttgagaggaaatcaggtccatgcgctgagcctgactgttcagcgcgcgggataaatctcggttggtttctagctgctggctgatggaggccggcagatcgccaccttgttccgccagtaattcggtgcgttccagcgctctttccgcttcaagctggcgctgattattcaaattgttacgcaatgtctgcaataaggtgtctgtccgctcatggttctttttatatacttcggcgcgcatgcgggacaattcttgccggttattggcagaaagctgagaaagctccagctcattcactttggctttacgagccgtaacttccgcctgtaatagtgcaaattgcgcctgcgccagcggagaggttggtgagttttgagattgcagacgcgtcgtggcttcacctaataggcggcgggcatctgattgttgttgaggaagttgccccagagagtcgctaatttcccgcaaacgatcctgttcttgctgcatttgacgggaaagttccagcagttggctgctggtttgcaggatttgctgctccatctcattggtcgataaattggttggcaccggcagcggtttttcgctatccggcgtcaactgttgacgtaactctctggttaatttggggaaatcatcaatgactttctggtattgctgtgcccgttcgtcggactctttcgcatcattaagccagttgatagcaccttgcagcgcctgaacaatttccgcctggttggcggcgcctttattcgcctcagcctgcttcagctcttgtctgagctgagcctcattaggctgagttgccgcataaagcggcagagagagaaaaataccaagcaggaatgtggttatcaggcgcacgttatgcttccttaaatcaagttacgccataaagcgttaggttagcacggaggcgtcggtggaacggcttctgccagtagctcacccatacgggtgatggagccactgtttagctgcggagccagatacactttgcctgatgcaaataggttaataaccgttgagcccagcttgaagcgacccatttcctgccctttctccaatgcaatcgccccttcttcaccggcctgcgggtaggtccagcggcggataaccccttcgcgggttgtattggttgttcctgcccaaacggtttcaatgctaccgacaatggtggcaccgaccagaatctgcgccatcgggccaaaagcggtatcaaagatacagatcacgcgttcgttacgggcaaacaggttagggacattggctgcggtcagcggattgacggagaataaatccccaggtacatagatcatttcacgtagtacgccgtcacaaggcatatgcactcggtgataatcgcgcggcgctaaatacgtggtgataaaggtgccgttcttgaattcttcagccaacaggtagttaccggccagtaaagcttccagcgtgtaattgtggccttttgcctgcaagatttggtcttcgcggatagcgccaagctgactgacggcgccgtcagcaggctgtgccagcgcattgtcttccgccaccacagggcgtgcatccgggcgtaacggacgaacgaaaaattcgttgaaagtggcataagcggtgaattctgggttctgcgcttctttcatatctacgttatagaaacgggcaaagcctttaataaccagttgagtcaaccagccgccttttttgtctgcaccccagccagccaggcgcgtaagtccttgcttcggaagtaaatattgcagtctgattttgatgctatccagcacgagaacctcttggattaggcattagccattagataaaaggggcgcattgtaacgttcggcgcccgcaatgtcagttattcagaatctgaaagcggtttgcgtggtttgacttgttccatgctttccagaattcgatggtagttatcgaaacgctcttcggcaatatcaccgcgctccaccgcttcgcgcagggcgcagccgggatcggtggtatggctgcaatctcggaatttgcaatgaccaatgtagttgcggaattcgacaaacccttgcgtgatttgttccggtgctaaatgccacaggccaaattcgcgcactccaggtgaatcgatcacatcgccgccgtgctggaaatgatacaagcgcgcggcggtggtggtgtgttgtcctaaacctgagttatcggaaactgcgttgaccaaaatttgcgtatcgcttggtggtaacagggcgttcagcaggctggatttacccacgccggattggccggcgaaaatgctgatacggccagccagcgcctgttcaaaggctgccatcccttcgcgagtctggctagacacttccagtaccttgtaatcgatacggcgatagatatccatcatgccatcgacgaatttgcggccttcggcatccaacagatcgactttattcagtacgatcagcggttctacgtccagcgtttcacaggccaccagatagcgatcgataatattgagtgagagttccggcaaaatggccgagacgatcacgatttgatcgatgttagcggcgatcggcttcacgccgtcgtaaatatcaggacgggttaaaaccgaagtacgttcatgtaccgcttcaacaatacctttaactcgaacaccttcctgctgaatacccggtcgccaaacgacacggtcaccggttaccaaagaggtaatggtgcgacggatattacaacggtgttgggtgccatcagtggcttcaacgtcggcgtgctgaccgaaacggctgattacgataccttcttgcgcatcgccaagctgagagtcatctaactcaggttttctatcagtgcgtagccggcgctgatggttagcctgcacgcggcgttgttgacctttggacagtttattcttgctcactgcgcctcacttgaatctgcatttatcgctcgttgcgactaaaagaactatgatacacataattttatcatttaaccgtttgttcggttgatccccccgatgaataggcaggaaatatcatggcaggaaatgaaaataatctgatctggattgatctggaaatgaccggtctcgatccagagcgggatcggattattgagatcgcaacgttggtaacggatgccaatcttaatattctggcagaaggcccggttttggcggtgcatcagtctgatgagcaactggcgctaatggatgagtggaatgtgcgtactcataccggtagtggtctggttgagcgggtaaaagccagcccattcaacgaccatgatgcagaaatgcagaccattgctttcctcgaacaatgggtgccggccggcaaatcgcctatctgcggtaacagcgtgggtcaggatcgccgcttcctgttccgctatatgcctgcgctggaagcttatttccactatcgctatctggacgtcagcacattgaaagagctggctcgccgttggaaaccggaaatcctgccgggctttaaaaagcaaaatacgcaccaggcgctggacgatattcgtgaatctgtggcggaactggcttattaccgcgaacattttatccagctttagtctttaatagataaaatctggtttaaacacggcagaatcttgttctcagtactatgattctgtcgtgcaaatcacgggttttaagcgcttagccgatttattcaacacccgtcgctggcaaaaagtacatattgttgatttaatcgacacttgaacgaaaaaatgatttttttgctttcaggggcttgcagcaaaacggaattctcgtataatgcgcaccccgtaccgatgaagattttcgccagttagcgagatcgaatttagtacgtagagcgggaatagctcagttggtagagcacgaccttgccaaggtcggggtcgcgagttcgagtctcgtttcccgctccaaatttttcaagtagtggcagaagctaacgatgtcggcgaaccattcgctaatatctgtgatgcgggaatagctcagttggtagagcacgaccttgccaaggtcggggtcgcgagttcgagtctcgtttcccgctccaatcttcagccatgaataccaaatgccgtcaaacagacagcagggtgcatcagcatctcaatgcgggaatagctcagttggtagagcacgaccttgccaaggtcggggtcgcgagttcgagtctcgtttcccgctccaattttatcttcatctccaaaataattatccacagacagttcgcgctttttgtcgtgcctttcacagaatgtattaacttcttcaacagacttatccacagattctgtattttttatatactgatgctaattaaaccaatggctattgcctaaatttaactatttgttttaattgtttatttatttatgggaaaacgttatggcgatctcttgcgctttttttcccacttgattggcaaggcatttttatttttatgcacagggcgcttgacaggtttattacggaaaaacccgcgattgaaaagttatcatgcgtctcgcggcagccctttctcaatggctcgaaccagcctctttttctgcgatgactgcacttcaacactttgttctgcccgccgcgccaactgccgctcgatagcccagacgatatgctcatccaacatagggtcgatgcctttgcgactttccagcgccagcacaatttcatcctgataggcggcatttcccaaagccaccgagatattacgtagccagcgcagatgcccaatacggcggatcgcggaaccttcggtgactcgtagaaacttttcttcattccaggcgaacagatccagcagctttggcgtatgtaataccgcacgcgggctgaaatcttcctcctctgttagttgagagaagcggttccacgggcaaatcagttggcaatcatcacagccataaatacgatttcccattaacggtctaaattcttcgggaatagcgccttccaactcaatggtgagataggaaatacagcggcgagcatccacggtgtaaggcgcgacaatggccccggttggacaggtcgtcatgcaagccacgcagcggccacactgttcctcttgcggttgatcgattggcaacggcaaatcaatcagtaattccccaaggaagaaccaggagccagactcgcgattaagaataagtgagtgcttgccaacccagccaatacccgctttggcagcgagtgaacgttccattatcggagctgagtcgacaaacggacgaaaattgacgccgttttcactcgattgctgtgcgcaatactcctgaatctgatcgcccaatttctttaaccgttgccgcaatagcttgtgatagtcgcgtcccaaggcatagcggctgacatagcccaattctggattgctcaaagtgctggcaaaggcggctttggctggcaggtagttcatgcgcacgctgataacccgcagcgtaccgggcagcagttcatgggggcgcgcccgcaacataccgtggcgcgccatccacgccatttcaccgtggtattgcttgtctaaccacgcctgcaaacgaggttcttccgcagaaagatcggtatcgcagatgccaacctgctggaaacctagcgattgcccccattgcttgatatgttgggctaattgattcagatcgagggggtgtgtcatgacggaccatagtaagaaacaaaacggcctaagtttaccacactctgttttttctgcggactgggtcaggcaacatgaaagcgttgctgctgccgctttgtcactttctctgtttgaactgatggttagagccggtgaagccgcttttgctctggctcgccaatattatcctgcgagccgacactggttgattctgtgcggtcatggcaataacggcggggatggatatatcctggctgcccgcgctcaagcggcgggtttgaaagtgacattaattgcctgtgagggcaatcgtccattgcctgccgaagctgctctggcgcgtgagcagtggttatcggcgggggggaatatttttcctcaggatagtctttggccgcaggatattgatttaattatcgatgggctgctgggcaccggcttacgtgccgcgccacgaggcagttacgctactttaattgaaatggcgaatagatatcgggcgcctaaactcgcgctggatattccttctggcttaggggcggaaaccggcgctgctcctggcgtagtgattcgagccgagcatacgctgacgtttgtggcgctaaaaccagggttattgaccgggcaggcgcgtgattgggtcggtcagttgcattgcgacgatctgggtttgtccccatggcttgatcagcaaatgccgcacattgagagaattacctctgataacctcagcaaatggttgaaaccgaggcgaccttgttcttacaaaggtgagcaaggtcgtctattgttggtagggggtgataaaggtttggggggcgcaatacggatggcgggagaatccgcactacgcagcggtgctggattggtgcgagtgcttactaacatcgatcatgttgctcctctactcactgctcgtcctgaacttatggtacaggcactcagcgatgatttattgattgaggctatcgattgggcagacactttggttattggaccggggctggggcaaggagattggggcaggaatgctctgaaattactgcaacagagtgataaacctgcgttatgggacgcagatgcgctcaacttgctggtattaaatccgctgaggcgtcagaatcgagtgttgacccctcatcccggtgaagcggctcgtttgctcggttgtaccgtcgctgaaattgagagtgatcgcttactttcagttcgtcgactggtagagacatacggcggcgtagtggtactaaaaggtgccggtacgttgatagccagcgagcagggcgaaatggcgatagccgatgtggggaatgcgggcatggcgaccggcggtatgggcgatattttgtccggtatcatcggcggtttgatagcgcaaaagctggtgctgtatgatgcggcttgcgcaggttgtgtggtccacggcgcggcagccgatcaactggctgaacaacaaggcacccggggtttactggcgacagatttattgccggttattccgaactacgttaatcctgagttagcaaaatagatatcaagaatgaaagaactcgttttacctttgcctgatgaggcagcaaccgttgcattgggggctcgtttggcgcaagccttcgaaggtgccagcgttatttatctgttcggcgatttaggtgccggaaaaactacattcagccgcggcttcctgcaagctctgggacatcaaggccacgtaaaaagccctacctataccttggtggagccttacgcactgacgcctcggccggtttatcatttcgatctttaccgattggcggatccggaagagcttgaatttatgggaattcgcgactatttcgatcgacaggctatttgcctggtggaatggccgcagcagggcgagggcttcttgcctaagcctgatatcgaattacatttggactatcagccgcaggggcgtgaagctcggctggtagcgctgtctgattctggtgcggatgttctgcaccgcttagccgctgcgcaaggataaactgtcgatgatgcttagctggagaggctatttagccaccgcattgttggttgtttctagcgtattggccgctccggcggcatgggcgatgaagttaaccgatatcaaagttaccaacggttccggcgaaagtcagataaccctgagcttcgacggcaaaccgatttatgccttcttcccgctgagcgggccggagcgcgttgtgctggatattcgtcagagcggtaatctttccggtttaccgctggaattcagtgggcagaatctgttgaaaagaattcgctccagccagccgaaagacccgcaaagcacccgattggtgtttgaactgacgcaaaaagccaaaacacgcgcagtgacgcagcaagtgggcaatcaatataacgtggtgttcaccctgacagccgctggtacgccagtacgtcaaactcaaacggtgaccacggcgacggcgacgcgacaggcaaccaaggccaccgccggcagtaatccgttcaataataagccaacggtagtgaccagcagcccgaccatcaccacctcaaccacgcgtccggttaaaaccagcgcgccagccagtagcgatcgtgtggtggtggctatcgatgctggtcacggcggtcaggatcctggcgctattgggcaaaatggtctgaaagagaaaaacgtgaccctctccattgcccgtaagctggagacattactcaataatgacccgatgtttaaaccggtgttgacgcgcaacggcgactattttatctcggtgatggggcgttcagacgtggcgcgtaagcaggctgccaacgtgctggtttccattcatgccgatgcggcaccgaatcgcagcgccaacggtgcttctgtctgggtactgtctaaccgtcgcgcgaacagtgaaatgggcaactggctggagcagcatgagaagcaatctgagctgctgggcggagcgggtgacgtactcgccaacacttcagccgatccttatctcagtcaggcggtgctggatttacaatttggtcactcccagcgggtgggttacgacgtagcggtaaaagtgctacatgagcttcaagccattggttctattcataaacgtaggccggaacacgccagtcttggcgtgttgcgttcaccggacattccctctttattagtggaaaccggctttatcagtaatggtacggaggagcggctgctcggcagcagtgcgtatcaggataaaattgcccaagcgatttacaaaggcttgcgcagttatttcctgtcgcatccgctacaagccgacccaaaggtcgaaaaccgtccgctgggcgcaacagcggcggttgaaaggtcagcgcgtcaaagtggtgttaatcagcctggcccggtagtcagtgcggtcagcagtggggggaaagccaccattagcggtaaatcgctgattcacatggtaaaacggggtgaaactctatccggcattgccagccagtacggtgtcagtatggcggcgatgcggcagaataatacgctgaagaaagacgtggtatgggttgggcagcgcctgcgaattcccgcatctggcagcgcggtagctagcgtcgccaaggtgcctgcggtgaagaaaatcagcccggccaaaccgatcaagcatcaggttaaacgcggggatactttatccgctattgcggcgaaatatggtgtatctcaaagtgagattcaacgcgtgaataagctgaagtctggttcggtacaactcggccaaacgctcaccattccacagtcttaaccgaagggatttgttatgccgattcagatattaccgccacaactcgccaaccaaattgccgccggtgaagtggtagagcggcctgcgtcggtagtaaaggagttggtggaaaacagtctggatgctggtgccacgcgaatcgatattgatattgagaaaggtggcgcaaaattaatccgcatccgtgataacggctgtgggatagctaaagacgacttatcgctggcgttagcgcgccatgcaaccagtaaaatcagttcgttggaagatctggaggccattctcagcatgggctttcgcggtgaggcgttggccagtattagctcggtttcccgtttgatgctgacctcgcgtaccgccgaacagaacgaagcctggcaggcttacgccgaagggcgggatatggcggtgaccatcaaacccgccgcccatccggtaggcagtacgctggaagtgctggatttgttttataacacgccagcgcggcgtaaatttatgcgcacggaaaaaaccgaattcggccatattgatgaagtggtacgccgcatcgcgttggcgcgcttcgacgtggcgattcacctcactcacaacggcaagctggttcgccaatatcgagcggccccagatccttcgcagcatgaacgtcgtttggccagtatttgcggcccggccttcctgcaacatgcgctggcgatttcatggcagcacggtgatttgaatattcgtggctgggtggccgaccccagcgctgcccgaacgcctagcgagatgcaatattgctatgtcaataatcgcatgatgcgcgatcggctgattaatcacgctatccgtcaggcttatcaggatctgctaaaagacgatcagcagcccgcttatgtgttgtatctggatattgatcctcatcaggtggatgtgaatgttcatccggccaagcatgaagttcgcttccatcaggcacgtttggtccatgattttatctatcaggcggtgaccagcgttttacagcaaagcgcagaaccagcgctgattgtctccgaagatggcgaaattgaagccccgcgctggcagccggagaatcgggtggccgctggtggaaataaatacgctcagccacagccggaaaaaacagccattcagcagcaatacgtggctccacgggttgccaatacgggttctcatacttctgcacgtgagcctcgagcgccagcctatacgccgccagcgccttatcaaaaacagcagggtgaactgtatcgcgaattgctgaaaccggctcctgcgacggataagttgccagaacaacagcctgcggcagtgataaaaagcagaaaggatgaagaaccgctgcgcagcggacaatacagctttggccgggtattgacggtgctgccaccctgctacgcggtgatagaatatggtcagggcttggcattgctttctctaacggttgccgaacgctggctgaaacaggcgcagcttaatccgccagaggaagggttgcgtccgcagccgttgttgattccgcttaaactgactttggataaaaacgaagccacggcctgccagcatcaccagaaattattgattaccatgggaatcgaactggcgattgaacacggacgagcgacgctacgtgcagtatctttaccattacgccaacaaaatttacaaaaactgataccggaactgttaggctatctgtcgcaacataaggagatgtcgccggaggtacttgccacctggattgcccgccgccttggcagtgagcatgaggtctggaatgtatcccaagcgatacaattattgacggatgtcgaacgtctttgtccgcagctggtgcaatcaccccctgccgggcttttacaacctattgatatacaggccgcattggcaactttaacccatgagtcatactgagaatttgaaccggcccccagctatattcgtgatggggccgaccgcttccggcaaaacggcgctttctattgcgctgcgtcaacatttgcctgtggagcttgtcagcgtggattccgcgctaatttatcgcggtatggatatcggtaccgccaagcccagcgcagaagagctggcgctggctccccaccgattaatcgatattcgcgatccggctgaatcctactcggccgctgatttccgtaaagatgctctgaaagaaatggctgaaattaccgccgccgggcgtattccgctgctggtggggggcacgatgttgtacttcaaggcgctgttagagggactgtctccgttgccttctgccgatccagaggtgcgccagcgcattgaggcacaagccgctgaacgaggttgggaagctctgcatcagcaactgactgaaatcgatccggtttctgccgtgcggattcatcccaatgatccccagagactttctagagcactggaagttttttttatttcgggtaaaactttaacggaactgactaaaatttcgggtgaaaccttaccttatcaggttcaccaatttgcgattgcgcctgctagccgcgagttattgcaccagcgtattgaattacgttttcgtcagatgctggatgcaggatttgaaaccgaggctcgggcgctttttaaccgtggagatttgcatacggacttgcctgccattcgctgtgttggttatcgccagatgtggtcttatctcgctggtgagattgattatgacgaaatggttttccgcggaatttgtgcgacgcgtcagttggcaaagcgacaaatgacctggctacgaggttgggaatctgttcattggctcgacagtgataagccggaacaggctttagactctgtaatacaggttgttagtgcataggttgaatgattgtgtacaattgattagtactcagcgcgcagattttttttacgcagtttattttcgagccgataggttcttagttaaaaacaacaagcaaataaggaaaatatagaatggctaaggggcaatctttgcaagatccgttcctgaacgcattgcgtcgtgaacgggttccggtttctatttatttagtgaatggcattaaactgcagggccaagttgagtctttcgatcagtttgtcattctgttgaaaaacacagttagccagatggtatataagcacgctatctctactgttgtcccgtctcgcccggtatcgcatcacagcaataatccgagtggcggcaccaataattatcatggtagtaatccgtctgcgccgcaacaacagcagcaggatagcgatgacgctgaataaagcgtattgctggtcaaccatgacggagagcataagcaacattgattgtcttatgttctccgcactagcggtttttacccgtttgagaggttgcacgcttgtttgaccgttatgaagccggtgagcaggccgtactggttcatatctatttctcgcaagacaaagacacagaaaatctcagcgaattcgaatcgttggtatcttctgctggcgtagaggcactgcaaattgtgacgggcagtcgcaaagcgcctcatcccaaatactttgtcggtgaaggaaaggccgaagaaattgcagatgccgttaaggccagtggcgcatctgttgtcctgtttgatcacgcactttccgccgcgcaggagaggaatcttgagcgcctgtgtgaatgtcgggtgatcgatcgtaccggattaattttagatatctttgcccaacgggcgcgtactcatgaaggtaagttgcaggttgaattggcgcaattgcgtcatattgcaactcgactggtacgcggctggacgcaccttgagcgtcaaaaaggcgggattggcctgagagggccgggggaaacccaactagagaccgaccgccgtttgttacgtgaccgcattagcttgatcctcaatcgcctagagcgcgtggccaagcagcgtgagcaaaaccgacgcgctcgcaaccgggctgaaataccgactgtttcgctggtaggatataccaatgccggcaagtccagcctgtttaaccgaattacgtctgccgatgtttacgcagccgacaaactatttgccacgctggatccaacgctgcgccgtattaatgtggcggacgttggcgatacggtattggcggatactgtaggatttattcgacatttgccgcacgatttggtcgccgcattcaaagcgacattacaagaaacgcggcaggcttcgctgttattgcatgtgattgatgcagctgattcacgcgtgagcgagaatgtagccgcagtcgacaccgtgctagcagaaattgaagcggacgaaatccctacgctgttagtgatgaacaaaatcgatatgttggacgatttcgagccgcgtatcgatcgcaacgaagaaaacctgccggtcagggtttggctctcagccgaaaccggcgcaggtatcccgttgctctttcaagcgttgacggagcgtctttctggtgaaatcgcacactatgaattgagcttaccgcctcaggctggccgtctacgtagccgtttttatcagcttcaggcaattgaaaaagagtggatagaagagggcgggcatatcggtatggtggttcgactgcctatcgttgaatggcgtcgtctctgtaaacaagagcaggagctgatcgactacgtcgtttaattggccctttgggttaatgaaagagtcgggtttgatcgaacttgtgagattgagggccagcttcttatagggaagtgcgctcttggcctgaagaaaaccaatcatagaagaatggagctaaaacatggcgtggaatcagcccggtaataacggacaggaccgcgacccgtgggggagcagcaataataatggcggcaactctggcggaaataataataaaggtggccgtgatcaggggccgccggatctggatgatatcttccgcaaactgagcaagaaactgagtagtttcggcaaaggtagcggaagtggtaacggtggcgcaacacagggtcctggctttagcggacgcattgtgggtatcgctgcggtagccgttgtcgtcatttgggccgcaagtggtttctataccattaaagaagccgaacgtggcgttgtgacacgtttgggcaaactgagccatatcgttcaaccaggtttgaactggaaaccgaccttcatcgatgaagtgaccccggtaaacgttgaatccgtgcgcgaattggccgcttcaggcgtgatgctgacatccgatgagaacgtagttcgcatcgaaatgaacgttcagtaccgtgtaaccgatccggcagcttatctgttcagcgtaaccaaccctgatgacagtctgcgtcaggcaacggacagcgcagtgcgtggtgttatcggtaaatacaccatggataagattctgactgaaggccgcaccatcgttcgtagcgatactcagcgcgtattggaagaaaccattcgtccatacaacatgggtattactttgctggacgtcaacttccaggccgctcgtccgccggaagaagtgaaagccgcctttgatgatgcgattgctgcacgtgaaaacgaacaacagtacatccgtgaagcagaagcttacgctaacgaagttcagccacgtgctaacggtcaggcgcagcgtctgttagaagatgctcgtgcttatgccgcgcgtaaggtgctggaagcgcagggtgaagtcgctggctttgccaagttgctgccagagtacaaggctgcaccagaaattactcgtgagcgtctgtatatcgaaaccatggaaaaagtcctgggtcatactcacaaagtattggctaacgacaagagtaataatctgatggtgctgccattagatcaaatgctgcgtggacaggccggtgcggataaagccggtgctagcaaagactcaagtctgattcgtttgaatccgtcttcctctgcggcaagcagtccggagaagagcgcgactagctcagactctggctctgtcatggatcagcgccgggcaaacgcccagcgtgacacttccactcgcgtagggagagaataatcaatgcgtaagtcgatcttattcgtcgtggctgtggtgctgattgcgctctatgcttcattattcgtggtacaggaaggccagcgcgggattgtgctgcgtttcggtaaagtactgcgtgataacgataacaaacctttggtgtacgcaccggggctgcatttcaagattcctttcattgaaacagtgaagaccttggatgcgcgtattcagaccatggataaccaagctgaccgcttcgtgaccaaagagaaaaaagacctgattgtcgattcatacctgaaatggcgtatcagtgattttagccgttactatctggcaaccggtggtggcgatatttctcaggcagaagtgttattgaaacgtaagttcagtgaccgcctgcgttctgaaatcggtcgtttggatgtgcgtgatattgttacggattctcgtggtcgcctgacctctgatgtccgcgatgcgctgaataccggtaccgtagatgacgaagccgttactaccgaagccgataatgcgattgcttccgtagctgcgcgtgttgaagaggaaacccgtggcaaacagcctgcggtgaatccgaacagcatggcggcactgggtattgaagtggttgacgtgcgtatcaagcaaatcaacctgccggctgaagtttctgatgcgatcttccagcgtatgcgcgctgagcgtgaagcggtcgctcgtcgtcaccgttcacaaggtcaggaagaagcggaaaaactgcgtgcaactgctgactacgaagtgactcgtactttggcagaagctgagcgtcaggcgcgtattactcgcggcggcggtgatgcagaggcggctcgtctgttcgcagatgcattcagtaaagatccagatttctatgcctttattcgtagcctgcgcgcctatgaaaatagctttaacagcggcaacgatgtgatggtgttgagtccggacagcgatttcttccgctatatgaaatctccggataattccagcaaacgtccgtaagggggttcgcgtgtgatgcaaggcccgttaacgcgggccttttctttttgaggcagataatgaactccacaatctggttagcactggggctggttttggtgcttgaagggctaggtccgatgctctatcccaaagcatggcgtaaaatgattcaggcgatgacgcagttacctgactccacgctacgtcgttttggcggtgcattagtggttgctggcgtcgtcatctactacatgttgcgtagccgcatgggtggctgaatccaagcgcaaaaactgtgcaagcatgtgttaaaaagtgctgaaagcacacgggtgagatgttagaatccttttttaaggcaacctggtgatttttgagatgggtaagaacgtcgtcgtactgggcacccaatggggtgacgaaggtaagggcaaggtcgtcgacctgctgactgaacgggctaaatatgttgtgcgctatcaaggtgggcataacgctggccatactttggttatcaacggtgagaaaaccgttcttcatttgattccctcaggtattctgcgtgaaaacgtaaccagcatcatcggcaacggtgttgtactggctcctgatgcgttgatgagagagatgacagggttagaagcgcgcggcgtaccagtacgtgagcgactgttactctctgaagcatgcccgctaatcctgccatatcacgtggctctggataacgcgcgtgaaaaagcacgtggttcgaaagctattggtaccaccggtcgcggtatcggtcctgcctacgaagataaagttgctcgccgcggtctgcgcgtgggtgatttgttcaataaagaaaccttcgctgcaaaactgaaagaaattgtggattaccacaacttccagttggtgcattactacaaagttgatgcggttgattatcaggaagttctggatagtctgatggctgtcgatcctcagaccggcgtttctgttgccgatatcctgactggcatggttgttgacgtttctgaactgttggatagcgcccgtaagaaaggcgagctgatcatgttcgaaggcgcacaaggcaccttgctggacatcgaccacggtacctatccgtacgtgacttcgtctaacaccaccgcgggtggcgttgcgacaggttctggtatggggccacgttacgtagattacgtactgggtatcatgaaggcttactctactcgcgtaggtgcaggtccattccctaccgaactggaagacgaaaccggcaaattcctgcgtacgcaaggtaacgaatacggtgcgactaccggtcgtgaccgtcgtaccggctggctggatatcgttgccgttaagcgcgccgttcagatcaactctctgtcaggtttctgcatgaccaaactggacgtgctggatggcctgaaagaagtgaaaatttgcgtgggctaccgcatgccagacggccgcgaaatggatacgactccgttggcagctgaaggctgggaaggtatcgagccaatctacgaagttatgccaggctggtcagaaaaaaccttcggagtgaaaaagtacgagcagctacctcaggcagcgttaaactacatcaaacgtgtagaagagctgactggtgttccggttgatataatttctaccggcccagatcgtgacgagactatgatcttgcgcgatccatttgatgcctgattgatagatacaccgtcaaatccatgcgatcaaaatactcaaaccgggcttatgcccggtttgttgttcctcgataagcagtttttacgccaaaaacctccgcctccacctaaatgattagccgcaagctttgtggctggtttatcattcaaagaatacgctttcataaataacacttagactggtgtcatcgcagatgagctttagcagagtacactgatactcaggggtatacgtgcagttaacaagttttactgattatggcctacgggcgcttacctatatggcttcgttaccgccggggcagatgactagcatctctcaggtgaccgaggtctatggggtatcgcgcaatcacatggtgaaaattatcaaccagttgagccgtgccggattagtgaccgcagttcgaggcaaaaacggcggcattcggttaggcaaaccggcagaaagtatccgtatcggcgacgtcgtgcgtgaacttgagcctctgtctttggtgaactgttgcagcgatttttgccatatcaccccagcctgccgtttgaaacaggtgctccaccaggctgtacagaatttccttaaagagctggataactatactttggccgatatggttaaagataacgctccgctctacaagttattacttgttgaatagtgtgtttgcttaatgaataacgttgagcaacctgctgatgactacggaggaaccgcaatgtcacaagatcctttcctggagcgagaagcagagaagtatgaatcaccgatcccaagccgggaattcattttagagcatctcgccaaacgcgaaacgccagccagccgtgaagagttggccacagaactcaatttatccggcgaagaggctttagaagctctgcgtcgtcgcctgcgtgccatggagcgcgatggccaattaatctttacccgccgtcagtgctatgcgctgcctgagcgtcttgatttactgcgcggtaccgttattggtcaccgtgatggtttcggtttcttgcgagttgaaggcagcaaagacgatttttacctgtcctcagaccaaatgaaaatggctattcacggtgacgtggtgctggctcaggccatgggtgccgatcgtaaaggccgtcgtgaagcgcgtattgttcgtgtattagtgccgaaaaccagccagattgtaggccgttactttaccgacgcaggcattggtttcgtggttccggacgacagtcgcctcagctttgatatcctgattccgccagattccatcagcggtgcccgcatgggttacgtagtggtggtggaactgactcagcgcccaactcgccgcagtaaagccgtgggtaaaatcgttgaagtgctgggtgaaaacatgggcaccagcatggcggtggatatcgctttgcgcacccatgaaatccctcatacctggccaccgcaggtggagaaacaagtcgcagatttgaaagaacaggttcctgaagaagcgaagaaaggtcgtgtggatctgcgggatctgccgttggtcactatcgatggcgaagatgcacgtgactttgatgatgcggtgtactgcgagaaaaaacgcggcggcggctggcggctgtgggtagcgattgcggacgtgagttattatgtacgcccgcgtaccgcactggatgacgaagctcgcgctcggggtaactcggtgtacttcccgtcgcaggtcgtacctatgttgccggaagtgctgtctaacggcctctgctcgctgaatccgcaggtagaccgcctgtgtatggtgtgtgagatgaccgtctcctcccaaggcaaactgtcttcctataaattctacgaagcggtaatgagctcccacgcgcgtctgacctataccaaggtttggcgaattattgatggcgaagaatcattgcgtgagcaatataagccgttggtaccgcatctggaagagctacatgcgatgtataaagcgctggatcacgcgcgtgcagaacgtggcggcatcgccttcgaaaccgaagaagccaaatttatcttcaacgcagaacgtcgtatcgaacgcatcgagccaactatgcgtaacgatgcgcataaactgatcgaagaatgtatgattctggctaacatcgcggcggcgcgttttgtcgaaaaacataacgaaccggctttgttccgtgtccacgatcgtccaagtgatgaccatatttccgcactgcgtagcgtgctgaatgagctgggtctggtattgggtggtggaatgaaaccagagccaaaagactatgcggttctgatggatgaggttgccgatcgtccagatcacgaaatgctgcaaaccatgctgctgcgttcgatgaaacaggcgatttacgatccggaaaaccgcggtcacttcggtctggcactggcatcttacggccactttacttccccgattcgtcgttatcctgatttggcgatgcaccgggcaattaagtatcagctagccaaagagcagggttcggtgaaagaacgttggacaccaaccggcggctggcacagcgattacgaagatatgctacaactgggcgaacattgctctatgactgaacgtcgggctgatgaagccacgcgtaacgttgctgactggctgaagtgtgacttcatgcaagatcaggtgggtaaagtgtttaccggtattatcgctagcgtgaccggttttggcttctttgtgcgtctggacgatctgtttatcgacggtttggttcacgtttccagcctggacaacgattattaccgctacgacaatataggacagcggctgatcggcgaatcttccggcgtggtttaccgtttaggtgacaccgttgagattcgtgtggaagctgtccacatggatgagcgtaaaatcgactttgctttggtatccagcacgcgtaaaccgcgcggcgaagggaaaacggcgaaagacagagagaaaaaagcgggccaacgtaccatgcgtggcagcgcaccttcacgtcgtgaaggcggacaatctcgtcgcggtgctgccgatggcggcgcgagtagtggacagaagcgtaatcgtcgaggcaagaaaccggctaattttgagcctgatagcgctttccgccctgatgctgacaagccaactgacaaagcggctgcggagaaaaaggccaaagcgaaaaaaacgtctgaaaagacccggaagattgcggcggcgactaaagccaaacgagctaagaaaaagtcagccagttagtatccacagggcggcggagcgtcgccctgatcaaagcctaacccttagtgttacgcattatttaatcaacggcgggtcctgtataggattcaccgacacatgtaaaagagcatcatgagcgaaattatttacggtattcacgccgtcaaagccctgttagaacgcgatccgcaacgttttctggaagtttttatcctgaaaggacgggatgaccgtcgtttgcagccagtagttgcagagctggaggccgctggtctggtggtgcaggttgctagccgccaatggctggattctcaggtagaagacggtgttcatcaggggattgtcgcgcgtgtgcgggaaggccgtcagtatcaggaaaacgatctgccaagcctgctggccagcgtagaatcgcctttcctgttggttttggacggcgttaccgatccgcataacctgggagcttgcctgcgtagcgccgacgctgctggtgtccatgcggttatcgttccgcgcgatcgttccgctcagctgaatgcgacggccaagaaagtagccagcggcgctgcggagaacgtccctttgattcgagtgaccaatctggctcgtactttgcgcgtattgcaggaaaataatgtctggatcgtgggtaccgcaggggaagccgatcatacgctgtatcaaagcaagctgacggggccaatggctctggtaatgggcgcggaaggcgacggtatgcgtcgcttgactcgtgagcattgcgatgaattaatcagtattccgatggcggggaccgtatcttctctgaacgtatctgtggcgaccggtgtgtgtctgttcgaagttgtacgtcagcgcggtttgaaagctaaagcctaattattttcatagcgccatatttttaaaacttaatgttgttaaaggcagttcccgcgggggactgcttttttttgccttaaatatactcaaagatatatttaacacacaattaaaacagatagttaacgatgtttccatgatttaataattcagcaaatagatattattatattttataaagtcctaatgaaatctaataactattaattacggattgttcctattcatcagtatatttatccagcagtaagcatttatgtcagtgatcataaaatgcattacttctggtgtctttttatgtacatggagagttatgaaatggaaattaaatctataagattcaaaacaattgctgctctgatcctttcagctgcgttaactcctgcagcctttgctgcggataacagcgcagaaattacggttaaaggtaaattgatgccgggtgcctgccaattggatgtaaacggcggagaaattaattatgggaatatttctttacaggagttggttgaaaaagaagaaagaatcatcgatttaggaaagagaaatattgagtatgctattaactgccctcataagacagcagtatcgatgagctttgtcgataaccgtaaaggtagtgttccggctgaaattggtacctcttattttggtttgggtgaaggtgctcttaatatggatgatgtaaaggtcggttttggtggttataaagtctcactgaccgaacctaaagttgatggagagtctgcgcttctaggcggtattaatgatgttgaaggacaagcatcggtcgacttagataagtttgaagatcagaatattacttatttcaacgctgataaaagtatttttgaaggggcattattttcgggtcgctataacgtagatactaaaatcatcaatcctaaagagtttaagggaggttctagtattgaacttgatggttccgttaccatgaatgtgtcttatctctaataacctctgttaattaaatgggtgctgtatggcatccatttattgctattctattgccatgataagtaaagaaaataaggctatagggatataaatttatataataaacggataatttatgatgaaggttaatctggttttatcagtggctattttattttctatcgcaagtttttcccgcgcgaatacaaccggctcttcgactccgggtatccaaattaatgactcagtgattgtcattaatactgcggaaggtgaagcgaccactacgttgaccaataaggccgctaacccggtaatgttacattcttccgtggagtttgtagccgaagataccgccgagaaagtgattgtcacacccagcgttgcccgtattgaagccggcgagacacaaatggttcgtttcttcctaaaggacgaatttagaaactcactgactcagcaaaccatggtcagagctatattccagaatattcctcctaaaggaaagaataacgttcgtttgaccattagacacaacattccgttgattattcatccttccggtttagcaactcacaataaaccttgggagtttcttaagttcagtcgcaatgcacaagggaacattcttgtgaaaaatgaaggagactatgtagtccgtttatctaattctattgagttgcagccaggaaagggggctgctgagttaacgcagaattatattttaccaggaaagagtctggtggctattacggataaggcatttaaaggtcaggcgaatagcgtcagaatacaaccagctaatttatacggatatattactgagtcctattcttccgaactgaaatgatcgttagataatatcgatgtaaagctcgttgtatcacacggagatagaaaaaatgaaaccgaagaagaatagcattcggttatttttatatttcagcatttttcttatttccgtgagatctttggctgatgatggcgttgagtttgatattggtattcttgaagaacgcggtgtttctgccagtgcggcagactactttaaatataaagccagatttagctcaggagatcattccattgagttaactattaatggtgtagctcgcggctgggtagatatgacgtttaatcagcagggtgaaccgtgttttagcccggatttttaccaaaaaagcgggattattcctcccccaatggaaaacggctgtagtgatttacggctacattatcccagagctttggtgaatttattccccagtacgtcacgtattgaagtgattctcccggcggaattattacaagtcggtgaagttgttacggggaattatgaaaccggaggttcagcgttgttaatgaattacgacgcactggcgataagaaatcagaacggtagcaataatctgcaagcctccacggaggctgggtttaatagcggcaactggatttttcgttcccgtcagatctttagctataaggatcggcgacagcaatggagcaggctatatagttatttgcagcgtacttttatcgaaaaaaaaacgacgttgcaaatgggagaaattaacctgaatagcggcttattcagtacgccacaaatttacggattgcagataatgcctgaaagtgctttagccagcagagaaggcagcggagcaacggtgtcaggcattgcgccaacgcaatcaagcgttgagatacgtcaacgcggagccttgatttacgtgactcagttgccgcccggccccttcactttaacccaaattcctattaattccaccggtgcagatttattggtatcggtgataggcgtggatgggcagactcagagtttcagcgtgccggcggcgagtttcaacttgcagtatgttcccagaacgcgcggtatttatgccggaatgggtagaaccgggccaggttctaatcagcatcaggaaagctggctaggaacgttgacagacgttcgcccgttaggcgacttatcggatattactcagggtgttttgctgggttcccgttaccactctgccggattggcagtaaataccggtttgattccccgaactttttgggcggtgaatgcggtgaccagttgggatcgccagaatgaaaaacaaggcgttcaatggggtagccacgttggcgtgaagctggtttcctcattgaaactgaatttatcgactatgcatcgaacggctggatttcgccagtttcagcatagtttgcgagaaaggccagtggcggagttacccgcagtagagccaaagaataaaaatcctaacgcggataaaagtggcgttaagaatcaatacagggcgcagttaagttatagccaatcgttgttgggcggaatcagtctgggttatacccaatcggtatcttttgctaaacagcaggaacgccgttggagtttggggtggaataaacagctgccttacaacattaattttaatctgaatatggaaagaaacctgaatagcaaaggagacaagattatctatggaaatatcagcattccgctgaattctaatatgtccttaagcagcaccgtttctcaaagcagaggaagaactcagcaacgcgttggtttgaatcatcaggttaataatcagttgggttacagtctgggggtaagtcaaaccgcgaatcaatcggggcaggcgctcagcggtacgctgagggtattacctaaatatgctcagttaggcgtgggttattttcaggatagcgcgcgaaatagcagctatcagcttcaggccagtggcggcgtggcggtgcatagtgcaggcgtgactctttcaccttatgcgattcaggatacttttgccgttatcgcgctgccgggcatcagcggtgcagaaatacaaactaattcaggtccggtatggaccgatcggcgaggctatgcgttggctcccagtttgtcgccgtttagctcctctcggctagaagttaacactaagaaactggcgcgaaatatcgatattaagaatggtattcgattagtggatgccagccggggtgcggtacttaattataatttcaaagcaaataaaactcggcgaattttgctctcgatacgccttgcatcgggggagtatgccgctgaaggcagtgatatcacggataaagaagataattatgttggcactgttggtagcaaaggaacgttgctgctgagcaatagcgacggaaatccggacttatacattaaggacaatgaaaatgagatatgccagttggattacagtctgcctgaggcaaaggatgcgccggttttatatgaagaagctgatgcccgctgcctgtaaaaatactcccttcagcggcggttttaaactggcggtagcggccctactgctaagttttaccggaacggcactggcgcagtgccacatcagcgtgactcaatcccaactgcatttcggctccctgcctcgtgcccagcttaagggcgcgaccgatcgcggcgtcagtttgggaaaacactatttcaatgtcgatgtgcagtgtccgcagccgcgtttatttgccatcgcttatcaagggaatagccaaagcggcgaaagctattctttggattcagaccacgccagagttgagctgacgccttctgccgcgcaggctgatgggcaaccggtcatattgtatctcggcgctcgctctgcttttcccgcagggaataatgcggaacacgccagactccccctgcatccattgactcgaaatatgatttaccccggtcggcgagcggttagccaattaagttttcagatgacggcagaagtgtggctggcggcaaatgcacttaaccgcggtgaacgggttcacctgaatggcattggcacttttgacgtgatggagtaccaataatgaaccgttctctcaatagatattttgctcgttatctttcgattgtagtgggaacggtgagttacctatttgctcatttggctagcgcagagacttctgtcagcatttatttcagcgctgaaatcgagccggtagcctgtcaggtttccatcgatagcgccgttgattatggcgaaatagctcagtccaagctctctgaaacccactttactgctttgtcgcatcgggcgttgccgcctatcagcgtggaatgtgacgccaaaactgcgctgggatttaaggcgacggataaccgttccggcatcgcgacggatgccagactgattggcagcagcggtacggttattccgccagaacatcattttagtcttgggcgaacctcagacggacagccgattggtgcctggggcgtgatattttcttccggcacggtggatggccgcacggcgttgattgccggaacctcggcggagccattccatgcggcgaatacgttaaacccgaaaggaaaagtggctcaatggatggagaatggcactctcgctattggtgaaacctttacgctgcaaggggaagttgtggccggtattgcgaagaaatccgaattacctagcggcgatattattgttctggatggcatggctacgctggaaattgtttatttgtaaattagttagctgtaaatagtgggcgattaactttacgctttctcccgcattatctgtggtgatgatcggcaaaagtaccaggctgaaccatacttaatcctgatttttatgctaatgaatctgagggagaaaggtatggattggcggacgcacgaagtgttcaatcagcctgagccattatcaaacagcaatttatttttgtctgatatggcgttaagggaagctgtcatacgcgagcaagccggttgggataatgaagtattaatttcaatgggcgcgcagttgggatcggcagaatcgctggagttagggcgtttggctaatacaaatcctcctgaactattacgctttgacgcagctggacggcgtctggatacggtcaggtttcatcccgcctggcatgttctgatgaaagggttggtaggcaatcgggtgcataatctgagctggcaagaagatgctcgtatcggatctgtggtggccagagcggctcgtttgatgctgcatatacaggttgaggccggaaccctttgcccgataaccatgacctacggtgccattcctcttctgcaacaatccctacctgcgcaatttcaatcctggatatctcctttactctccgatcgttacgatcctcacgtcgctcccggtgatcaaaaacgcggtttattgatcggtatgggaatgacggaaaaacagggggggtctgacgtcttgagtaattccacgcgagcagagcctttgggcgctcgcggtgccggtgaagcttatcggttagtcggtcataaatggtttttctccgtgccgcaaagcgatgcgcacttggttttggcgcaggccgaaggtggattatcctgtttctttatgcccaaaattctgcccggcggcagcagtaattccattcgtttagaacgcctgaaagacaagctgggcaaccgctccaatgccagcagcgaagtagagtttgataatgccatcgcctggctattgggcgatgaaggggaaggcatccaccatattttaaaaatgggcggccatacccgtttcgattgtgcgttaggcagccacggcattatgcggcgagccttttccgtcgctctggattatgccagccagcggcaggcctttggtaagaatctgaccgaccaacctttgatgcgtcaggtgctcagccgtatggcgctgcgtttggaaggccacacggcgctgttattccgtttggccaaagcatgggaacacggcagcgcggaagacgcattattcagcaggctgatgacgccggccgccaagtataaaatatgcgggcagggcagcgcttttgtcgccgaagcgatggaggtgttaggcggaatcggctattgcgaacaaagcgaattgccgcgcttataccgtgaaattccggttaacagtatttgggaaggctccggcaatattatgtgtctggatgtgctgcgggttttgcgcaagcagcccgcagcgatagaaatgctgaatcaaaatttttatgaagttcgcgggcagaatcgtttgttcgaccgttcttggcgccagttggctttccggttaaaaaatccgcaggaagcacaggggcgagaattgacgctgcaactgtttaatctgaactgtgccgctcaattgttgcgttttgcatcgccgtcgctggccgacgcatggtgtcgtatgatgctggatcatcgggatcaatattctattccggaaccgctttgcgaactgttactgacccgagccgcagccgtttagcgatacagaatggcctgtgagtaccactgacccggaatgacagaatcgctattcataatgactaaatagtaacgggctccgctggcattggctttgctacggagtgccgcttcagcatccatcgggctgccatatacctgcaccgaagccatcccgattttttgtaatgttccgctttgagctcggttaatttcctgcgcgaaaggctgtggcgcgggaggtggtagcggcgtggttttcaatgcgctacaggcggaaaggctcagtgtgaacagtagaacgacaaaggcgcgataataggtcatggtgtgtttcctgtgttgatattgccccactttctctcagtgtaacgctcaaacattcataacgaccagatatgtgtcatttctgatatatctcggaggagattggtttaagactttattcagcaggtttggcactatggcggtgcgtttacaattggtttggctgataaggcttgtttgacccataaggactgttgttatggttgaaatgtcgttagaaaaagtacagggcattgaggtaattcacgccgcgccagcaggccagcgtcatcagcctttgccgacccttttcttctatcacggttatacctcctccaaagaagtgtattcctattttgcctatgctctggcgcaggcgggatttcgcgtggtgatgccggatgccgatatgcacggagccagatttgacggcgatgaaacccggcgactaggctgtttctggcagattttgcgttcaaatattgatgaaatggctggaattaaagaacactatcaacaaactggattaattgatggcgatcgaatcggcgtgggcggcgcctcaatgggcgggatgactactctgggagccttggtgcgctatccgtggataaaggcggccgctaatttcatggggtcaggttatttcacttctctggccaaaacgctgtttcctcctttgcccagtgctggttcaacaaagcaggatgaatgggaacgacaaattgctccgttgattgaatatgaggtaacccaccaactggagagaatcgcccgcaaacctttgctggtctggcatggtgaagcggatgaagtggttccggcggtggaaagtgagcgtctggtcgcagctttgaaagagcaggggttggatcatcatctaagttacctgaccgagcctggtatcggccataaaatcacgccaacggcgctgacggcgggcgcggcattcttccggcactatttatagttatagccgctcatttattggcatttatttataggcactaaaggccagaaaaaacccccgatagacgggggttaagtgttttaagggctgtattgttttactgtcggtctttctctggtgttgtatttatctttgcaattctagcggtaaagaacagcgttaatctgaatagagctgttgccgccaggttcatgcatagcgatgatttgataggcggttgcgccgcgttcatcggctaatttgctaacctgtgaggttgcatcgtcaggggaaaccacattgtgacccagtgacactgcgccaacgctgacacgctgttgctgcattgcctgttgagcggtgatttcagtggcggcgaaagtgctggccgataggaagaaactgaggatcgcggcgatagtgagcgtgattttcataggtgactccaatattttatttatatactttgaataagtttcctggctgctgcgccgcttgttatgcggtggatgtaactaatagtagttctcttttataattaataaatgcgctattgctgactgactctttcaaaaaatatgaatgatttttgcgctgacctaatgattttgttgaaagatttaaaaaactaatggatctccatccatagttcatttggtgaacaaaaagtgctatttattggctagaacggatatagctcgaataattcctctgcaatccttgagtttccctcctcgcgcaagtatagttacgcgtcatttttcggccgcacacaaacacgttccttgcctccatgggccgcggctgaccctatcaggaggctgaataatccgtaaggagcaattcgatgcgtcattacgaaatcgtttttatggtccatcctgaccaaagcgaacaggttccgggcatgatcgagcgttatagtgcaacaatcactaacgctgctggtcagattcaccgtctggaagactggggccgccgtcaactggcttacccgatcaacaaactgcacaaagctcactacgttctgctgaacgttgaagccccgcaggaagcgatcgatgagctggaaacaaacttccgcttcaacgacgccgttatccgtagcatggttatgcgcgttaaaaacgcggtaactgaagcatcaccaatggttaaagcgaaagacgaacgccgtgagcgtcacgacttcgcgtcagaaaccaatgatgattctgaagctggggattctgaagagtaattgccgtggtggccgctaatcgactggtactctctggcactgtgtgcaagacacccattcgaaaagtgagtccttctggtattcctcactgccagttcgtgcttgagcaccgttcaacgcagcaggaagccggatttagccgacaaacatggtgccgaatgcccgtgattgtcagtggacaccagtcacaagcattaactcacagtataacggtcggcagtcagttaaccgtggaaggcttcattagttgccatcaagggcgcaatgggcttaacaaattggttctgcatgccgagcagattgaattgatagattctggagactagcctaatggcacgttatttccgtcgtcgcaagttctgccgtttcaccgcggaaggcgttcaagagattgactataaagacatcgctacgctgaaaaattacatcaccgaaagcggtaaaattgtcccgagccgtatcaccggtactcgtgccaaataccagcgtcagctggcccgtgctatcaagcgcgcgcgctacctgtctttgttgccgtacactgatcgtcatcagtaatcggccactgtccattaacgactttgagaggatatggtaatgcaagttattctgcttgataaagtagcaaacctgggcagcctgggtgatcaagttaacgttaaagcgggctacgctcgtaacttcttagtaccgcagggcaaagctgtgccggcaactaagaaaaacgttgagttcttcgaagtgcgtcgcgcagaactggaagccaaactggctgaagttctgtctgccgctgaagctcgcgcaactaaaattaacgaattgggcagtgttacaatctcctctaaagcaggggatgaaggtaaactgttcggctctatcggtactcgtgacatcgctgatgcagtatctgcagcgggcgttgaagtagcgaagagcgaagttcgtttgccgaatggcgttctgcgtaccactggtgaacacgaagttcacttccaggtacacagcgacgtgttcgcaaaactgaacgtagttgtggttgcagaagcgtaagttacgctgctgttaaccgttaaaacgccagcctcgagctggcgttttgcttttctgagaacgacaaaaaagcccctgtaaccctgccagttgcgataattcctttccagcatccagacgtagcgatatcacgccgcgagcctttggttgggcgcagatagcctacagagagagaaatgggtgacagcggcgtttggatcaaagcccaggccagattatggctgcaaaatctgggctttatcagtccttggcattcgcgctgaggattatcgatcgcggcggtaagaaccgtccgcttggcggctaaacaatacttccgcactgttggccgtttcaatagccagcgcggttacgctgccttgcgcgtccagtatgattttcacttcttgtccggctttcaggttgctcagtggcttatcattgccttccacctgcgccatggcaaacacttcatttaccggtaaattattatcgcggaacagctgggccaacgttttacccgcttgtacctgatagctttgccaattcccctgcggtaacgttgaggacggctggttgactgcgggattgctcccgcgtaattcggcctgtaacggaatatctgtcggttctgccgtcaccgggaattgcccgctgccgttgttaccggaagaaggccaaagcagtgccagcaacaataccgctgcggcaatgatgacccagcggcgatggaagagaggcaagggctccatccaatggaaatcatccggcagatgccagattttttgcagccagtctttaatcacggcttgctttcccggcgacttgatctgcggtgctgatactttgtcgtcatccattaccgtttctggcggtaagagatcgggctcgccaatggagggctcggctttgacgcggttttcaggctcatcggtcggtttatctggcagaattcgctgccggatagttagccaagtgtgtaacaaaggctggtagacccgattgtttttccttctcctgggcgcgattctgcccatggtgacctctctttcaacgacgtaaaaaaaatcacagtgctcgatcagcgactgctggatggaaccttttccctgttacttgttagtatagtttgctaactgattgatgcagaaagaaacagggataatgctgccgaacgggctgttttaagtcagtgcagaaccattgtttctttttcttcgacaaaagtcatcattagcgatgcaagattttaccctactcccttgctgctgttatgcttgcaccttcgactttttagagaattaaggaaaatccatgacaaccccttcttttgatagcgtagaagcgcaagcaagttacggtatcggtttacagataggccaacaattacaagagtccggcttgcaggatttgcagccagaagccctgttggcgggcttgcgcgacgcaatggaagggaatacaccaacagttcctgttgatgtcgttcaccgcgcgctgcgtgaagttcacgaacgtgccgatgctgttcgtctggagcgccagcaggcactggttgttgaaggcgctaacttcctggaagaaaacgctaaacgtgatgaagtgaccaccactgaatccggtttgcaattctccgtgctgcaacaaggcgaaggtccaattccttcacgtcaggatcgtgtgcgcgtgcattataccggtcgtctggttgacggtacggtatttgatagctccgtagaacgcggccagccggctgaattcccggttagcggcgtgatcccaggctggatcgaagcactgactttgatgccggttggctctaaatggcagttagcgattccacacaatctggcctacggcgagcgtggcgctggcgcatctattccgccattcagcgcgctggtatttgacgtagaactgctggaaattctgtaaattctgagcggttagtgtgaaaaagggcgatccaggatcgctctttttttatggcttttctacgacttagttgccacttaacgctctgggaaatagcagattattttctaagtgaacgtgttccatcaaatcgccgacgaattcgttgagattggcataaagtgcgcgccaggtggtgcaggctccaggtgggggcgtgatgttattggtgatctgtttgatggtttccaattgctgccctgccgcttcgtgctctgattccatcacgaaaatcggcacgctagccattttccccattcctttggcaatcatggggaataacactttttcctctctttccatatgctgtaataaatcctgatgtagcacgctgagctgcactgctaaacctcgtgggcaggtgggttttgcggcatgtacgcgctctaccttttctgccattaacaccagctccggcaattgctcgcggtgccgttcatgatagcggttgagaataaaactgatcaggtgctcctgtggaacctcttgccagttctgcactgcctgagtttctttttgcaacatggtgagctccgcttccaacgcgtcaatattcagagccctgcgctcggcggcacgttgtagtgtctgtttccctccgcagcaaaaatcgagttcataccggcgaaataacgttgtggctcgtggtatggcaatagccagagaaccgagagattgattgcggtaatccattatgacacctctttaatgtgtaacttctataagttgcattataaatgcatgttaatgtgtgtgccatagttattaagaggtagtaaggatgagggagaaagagcaaaagcgctccgtagagcgctttaaggagggattacttcttctgcaaatcgacctgataaacttcaaaaccaatgtcatccagtccctgtgccttcatgggatactgggatttttgcttgataaattcagcggctttggcacttggtgaagtttcaaaacgaatatccaacggctgcgaactggtgatttcggctagacgccagttgttatcagcctgaggcttaacctgaccgttcttcttggtttctgcgctgatataggcagagagtaccgaacggttctcatccggtgaagcaaaggcaatatggtcatcgccggtgcccgcgaatttgccactgtaagcgcggtagttattggtcgcaatcaggaaagtggcctttggatctagtggcttacctttgtaagtcaggtttttaatacgttcggctttatcgttgatcagattacagtcgccgttgtagcgagccggctgtgtcacatcaatttcatagttaacgccgtcaatcacgtcgaagttataggtacggaaaccgttccagttaattagcgactgcggtttgctgcttttcacatcgatctgattgaattgcccggcagagcattccagccactgcttcacctcagcgccgctggctttcactacgaccagagtattggggtagagatacaaatccgcggcattacggaaggttaaatcacctttttcgacttcaacaaaactggccggatcgtttttgcgaccgcctgctttgaacggcgctgcggcagaaagcacgggtaaatcggccagatccggatcgccctgaataaagtgttcggtataggcgcgctgagcgttgttgacgatctgtaccgttggatcgtcctgaatcagcgacaggaagctatacatattatcggaggcttttccgataggttggctgacaaaatcgcgggtgcctttatggtcatcggccagtactttaaccagcttggcgttttccggtgccagcgattttttgttggttttatcgtagatagggcgggcttctgccttcgcctgttcgacctgccagctacctttatcgttattcagtacaaagtctacaacgcctaaatggtcaccccattggcccggcattactgctggaatgccgtttagcgtaccttgcgctatatccgcgcctttaatcgcagcgaaatctttacttgggaagacggcgtgggagtgcccgaacataattgcgttgattcccggaacctggctgaggtaataaaccgagttctcagccatggttttatacggctcgctggataggcctgagtgcgggatggcgataatcaaatcagccccttgcttacgcatctccggtacccattttttcgcggtttcggtgatgtcgtctacacggactttgcccgtcagattggctttatcccagatcatgacctgtggcggaacaaaaccgatataaccaatgcgtaaattatgggttttaccgtcgcgatctttaaccggtgtatcggcgatcaggaaaggttggaacagcggtttaccggtttttacatcaatcacgttagcatttacataggggaattttgctcccgccagagatttcttcaggtaatccaggccgtagttgaactcgtgattaccgatgtttcctacggcataatccagcgtattcattgctttgtagaccggatgaatttcgccttctttcaatcccttggctgccatgtaatccccgagtgggctgccctgaattaagtcgccgttgtctaccagtacgctattaaccgcttgctgacgcgctgcgtcaatcaggctggcagtgcgaaccaaaccgaactgttcagtcggtttatccttgtaataatcgaaatccatcatgttgctgtggagatcggtggtttccaatacgcgtaaatcaaccgtagcggcctgagccgcgctggcaatcagacaggcgagtagggacaacgtcaggggacgctttatcatggctttctccattgtggctttccatatgagagctattcgacatgtatcgcaaaagcagatgtaattttaattaattgtggcaacaaagtgtgaagtttggcagaaagccagccagattaacgcgtagacgctcacagatgcggcaggttaatccccttgattttattacatgttaagttggcgatggctattaatggcaaaattcactagtctgctactcaagccgaattcatcctttaggtgaagtttattttggtatttacctctaaaataaatagagggaaaagggcgttgccgaccggtaacagccggactgcggtgagccgaacagcgacgaaaagaatgatagataacttcagaggtggatgatgttagagcaaatttgccagttggcacgcgatgccggggcggcgattatggccgtctacgatggagagaaacctcttgatgtagcacacaaaaaagatgattcgccggtaaccgcagcggatctggcggcgcatcatattattaaagccggtctggcagcgctgacgccgaatattcccctgttgtcggaagaggatcctccggcgtgggaaattcgccagcactggcagcgttactggcttgtcgatcctctggatggaactaaagaatttcttaaccgaaacggtgagtttaccgtgaatatcgcgctgatcgagcaaggcgcgccaatcttgggcgtggtgtatacgccggtgacggatgtgatgtacagcgctgagaacgggcaggcgtggaaagaggaaggcggacgtaggatgcagatccaggttcgtgatgcgcaactgccgctggtggtggtgagccgttcccacagtgatgacgagctaagagactatctggctcagttgggcgagcatcaaacggtatccgtcggttcttccctcaagttttgtctagtggccgaaggaaaggcgcaattgtatccacgttttgggccgactaacgtttgggataccgccgcaggccatgcggtggccgtcgcagccggagcgcaggtcaatgattggcagggcaaacctttatcttataccccgcgtgagtctttcctgaaccccggcttcagagtgtcgctgttttaagacttcagcaactggtgcagttgggcgatgacctgctgcacttcttccgcgcttaatgccccatctttaacgaaacgaacgttaccttgctgatccagcaccacgatggtggagcttttggcggccagatcccaagctttcttcacgttgccattgctgtcgacaataaactgcgaccagggaaactcacgcttactgtcttcaatgctgttacgcacaaacatagcagtgccgataatggcgtcatcggtatcgacgattgtcgtcgtttggtaacgatcgtgcggtaatttggcggccttgattgcttcaatcaagggggcattcatctctttggcactgctgcggccggcgatatgttgcaccacccggactttgccggctaattgcgagctattccagtttttatagctaaacttattattagccaaatccagttcacctttatcactaacacccaccggcggcacacgctgatcgagttgaatgttatgagccgaggcaagcaaaggtgtgaaaataagggaaagaatgagcaggctattttttatcatgtgatgtccttgacgatgctgaacgatggaattaggcacttgcgccgcgaattgaggcaagttttcaaatcataggtgcagatcagaggtctgtcctgtctgatgccgattttagtaatcgttactgtttagatggttattctgccttaacggccgtttatgttcgtgtgattctgtaattttatgtaaacacagtatgtatgactacttttggcggaacttagcgccactcttcaggtctattactctgcaattatcttacgctacctgtgatcctggtcgcttaggccattcgcggagcgtatttgtgtcatgggaggaaagcaaaaaaatgaggatcttccagcgttacaaccccgctaaagtcgcgatgtatgtcaaaaccctattccgcggtcggctatacatcaaggatatgggggcttttgaattcgacaaaggtaagattttgccaccgaaagtacgagataaacgccactatagcgtgatgtccgaggtcaaccgccaggttctacggctacaggcagaaatgggttgataaggcgtaaaagcagtagcgccgaatgaattgcggccccgataatggggccgctagtattttcagcaagtcattctgctcgtatcaatcaggcatcgctgctttcgtgcggcgctttgggcagaatgggagccggagtatcagtgagcttggtaaccagtagctgatcgatcttgtagctatcgatatcgaccacttcaaacttgtagcccgcatacttgacgaaatccgtgcgtttcggaattttacgcagcatatacatcataaaaccgccgatggtttcataattgccagactgcgggaactcatcgatatccagcacgcgcatcacgtcatcgataggcgtaccgccttcaatcagccatgagttttcatcacgagcaacaatctgttcttcctgcccctggccgactaaatcccccatcagcgtggtcattacatcattcagagtaataatcccaaccaccaatgcatattcgttaagaataacggcgaagtcttctccggcagttttgaagctttccagcgcttcagaaagcgttaaagtatccggaactataagcgccgagcggatttgtacgccgctgctcagtaccaaactctggttgcccagcacgcggtttagcaagtctttagagtcgacgtagcctacgacctgatcgatatggccgtcgcaaactaaaaacttggagtgcggatgagtcgcaattttctctttgatgctttcttcgctttcccgcaggtcaaaataaatcacgctttcgcgagatgtcattgatgacggaacggtacgggattccagctcaaaaacgttctcaatcagttcgtgctcttgtttgcgcagtaccccagctaatgctccggcttccacgacggcgtagatatcatcagatgtaatgtcatccttgcgaaccattggcaacttgaataaacggaaaatcaggttggccatgccgttgaaaaaccacactaacggacggcagatcatcaggcagaaacgcatcgggttgacgatccggacggcgactgtctctggtgcaatcataccgatgcgcttcggggttaaatcggcaaacaggatgaacaagctggttaccagaacgaatgagcagatgaaactgacctggtctgccatttctggcgacataaagcgctcgaacaccactttgaatgacggcgagaaagcggcgtcaccaacaataccacccaaaatagcgacggcattcaggccgatttgcactactgtaaagaaaatgcccggcgtctcttgcagtttcagcacccgaagtgcgttgatgtctccctcatcagcaagaagtttaagtttgattttgcgtgaagcagccagcgatatctccgataaagagaaaaaggcacttaccgcgatcagaaaaagaatcagtaaaatactgtttaacataatctatccgtgtcgtaccgacgattcagtcggcgatcgtaaggaagggtcatacataaaagttaaaatggcgggcaggaaagccgccattgggctgtgtcaacagcccggatagtatagcagcagcaatcagatgcccgctagcccctacaaattcggtggcaggcaaaccccaatgccccctaaaccacagtagccgtgaggatttttatacagatactgctggtgatcgtcttccgcataatagaaaggcaacgccgcagtaatctcactggtaatgatgcgcttatcaccggcgtctgccatcgcttgctggaatcgggcgcggctggcgttagcctgctgttcctgttccggggtcaatacgtagatagccgagcgatactgagtaccgatgtcgccgccctgacgcattccttgagccgggtcgtggttttcccagaaaatctgtagtaactggtcgtagccaatcactttgggatcaaacaccactcgcaccacttcggcgtggccggtgcggccgctgcaaacttcatgataagtcggatttggtgtatagcctccgctgtagcctgcggcggtgctataaacccccggttgttgccagaacaggcgctctacgccccaaaaacagcccatggcaaaaatcgcttctttcataccttctggaatatgagtcatcgagtggccatttacggcgtgagtagttgcaaccggcatcggggtggtgcgtcccggcagggcatcttgtgcgttaataacggctgatttttctgaattgtgcagcaaaatgaactccggttatcacagtgttaaaggatagatagttgtatctgattgcgagtttgcacacaataagaggcatattgcgttaatgtatcagcttaacgcagaatcttaggggcgacaggcttaaatcggtcttcataaagggaaatatggtgtgaaaacaccgtcatatatccgttagccggtgagatcgtttttttacaggaaagtaaaaattaatcaggagtacgcgtgtctcgataccctattgtgtgttttttgtgtgcattactcgcaacaccgtttgcttatgccgccaatgttcggctgcaggttgaaggtcttagcggggatttggaaagaaacgttcgggcgcgattatcaactatcggcaccgatgaagtcagcgccgatggccggttccgtgccagggtggacgaagcaatccgtcagggacttagagcgcttggctattacgatcccatcattgaatttgatttacagcccaagcctgcaccggcgcgttcaatattaatggtgaaggtcactccgggtgaaccggtattaatagccagcgttgatatcgtattacaaggcggtgcgaaaaccgatccttcctatctggctctggtacgccgggacacgccaaaaatcggttcaattctgaaccacggcgaattcgatagcttcaaaggttcgctgactaatctggcgttacgccggggttattttgacgctaacatgatcaaaagtcagttaggcgtagcggctgaattacggaaagccttttgggatatcgattttgacagcggcgaacgttatcgtttcggtacggtgagttttcagggttcacaaattcgcgaagattacctgcaaaatttggttcctttccacgcagggcaagattacagctcggacgatttagccgaactcaaccgccgtttagcggccaccaactggtttaactccgtggtggtttctcctgattttcgcgatgcgaagaaaagtaaaacattgccattagacgccgtgctgacgccccgcacggaaaataccgttgagctaggcggtggttttgccagcgatatcggcccaagggtaaaagccagttggcgtaaaccctgggtgaataatcgtggccacagttttacgacgagcgccaacgtttcggcccctgagcaaagtcttgattttagctaccgcattcctttgctgaaaaatccacttgagcaatattatctgcttcagggcggtttcaaacgtaccgatctgaatgacaccaaatctgacaccaccacgctgaatgtggcgcgtttctgggatatgtccagcggctggcagcgttctatcaatctgcgctggagtctggaccactttacgcagggtaacgttacggataccactatgctgctgtatccgggcgccagtgtgaatcgcacccgtcagcgcggcggcgcgatgccgtcgtggggagacagccagcgttactcggtggacgtttctgataccacctggggttccgacgtcgattttgccgtgttccaggcgcaaaacgtgtggattcgtacattaggtgagaaaaaccgcttcgttgcgcgaggaaatctcggttggatcgaaaccaataactttaatcgagtccctccatctctgcgtttcttcgccggtggcgatcgcagcgtgcggggttataaatatcaaagcatttcaccgctggatagttccggtaaattgagcggcgcatccaagttggctactggctccatcgaatatcaatataacgtcactggaaaatggtggggtgccgtatttatcgattcgggtgaagctgtgaacgatatccgtaagagcgattttaaaaccggcgcgggtgttggcgtgcgctgggaatccccggttggaccgattaaatttgaccttgcagcgccggttggcgatcaagaaacccacggagtccaattctatattggtttggggcctgaactatgaattggctaaagaaactcagtatcgcatttttactcattttgctgttgctgatcggcactgtggccggtttgctcggcaccactaccggtttgcactttctgatcaacagcgcggcgcgttgggtgccggggctggatattgccagtgtcagcggcggctggcgggatctcacgctgaaaggcattcagtaccaaatgccgggcgtgacggtgaaagccggccagttccatctttccctgcagttatcttgtcttaaacgtagcgaactgtgtgttaacgctttgacggcgcaggatattgacgtggttgtcgatacaaaattgctgccgccttctgagcctgtgccgccggatagcgaacccatgggcgagctgagcacgccgtatccgatgactctgcggctgctggcgattaaccatgtcaaagtgaccatcgacgatacggcgatttcgctggacgagttccgcactggtgctcactggcaacaacgcgcgttaaccttgatgccgaccaaaattagcgggttgttgattgccttaccgaaaaccacgccagttgccgtgccggaagcaatgaaaccggcggtagacacggcgattgcagtcaaagaagccacggaaaaagcagcggagaaagtggctgattccgcgccaacgcaagatttagctcagtcctccgagcctgaaaaaccgctaggggaaacgttaaaagccctgttcgccaagccgttgctgccagagttgcctgattttcgtttgcctgtcgatttgcagattcaggaaatcaatgctcaacagctgcgtttgaccggcgataccgaagcattaatcactagcctgatattgaaagccagcacgcaagatcaaagggtgacgctggaaacgttggatattaaatccccgcagggtggcttgaccgccagcgggcaggctacgttggcagataaatggccgttggagttggtggtaaatagtgccgttaacgttgagccgctgaaaggcgagaaaatcaaactgaacctgggtggcggcctgcgggatcaactcactgtggcgctaaatttgtccggcccggtcagcgctcagcttgaagcacaaactgaactggctaaagccggtttacctctggctttgaccttacaaagcaagcagctgcgttggccttttaccggcgacgctcagttccaggtcaataacttcaaaacgcgctttaacggacaggcctcagattatgcgttgtctattcgcgcagacgtaaaaggggcggatattcctcccgccgtcattactttggacgggaaaggcaacgttgagcagtttaggctaacgcgtttgcggttggcggcactgcaaggaaataccgatctaactggcgtagccgactggagtcacgctattagctggaactcggttctgacgctaaacggcatcaatacggcgaagcagtggccggaatggccggcgaaactggacggcaagattgtcacccgcggcagtatgcacggcggcagctggcagcttaatgttccagagctgactttagacggtaacgtaaaacagaatcgcgtcacggccagaggctctctcaccggcaatgccgccggacaatggcatattccgggtatcaatctggcgttgggtcgcaataagctggatgtgaagggcgatctgaatgacaaatgggttctcgacgccaatgtggacgcgccgcagttagatggcgctctgccaggtttggctggcgtggttaaaggcaatctgaagctgcgcggcgatcttgcagcaccacagcttttggccgatctaaccgcgacggggttgcaatggcaagcactacatattcgccggattaaggtcgatggcgatgtgcgttctgctgagcagattcaggggcaactggcggtacgggttgagcaactgaagcaggacgacttattggtcagtctgttgacgctagatgccaaagggagcgaaaagcagcatcagctacgtttaaacgttcagggagagccggtttctggccagttggcgctggacggcagtttcgatcgtcaacagcagcgctggcgtggcaatctgaacaatacccgctttgacacgccagttggagaatggcgtttaaatcgcgctattgctctggattatctcaatacggcgcagaaaatcaccatcgggccgcactgctggcagaacccgaatgccgaactttgtgtgccacgtaccattgaagctgggccaagcgggcaagctagcatcgtgcttaatcgctttgatttggcgatgattaaacccttccttgggccggataccacgctaaacggcgtattcagcggtcgagcggacgtgagctgggcagaaggtggtgccttgcctcaggccaaggtttctttggtgggtaaaggggttaacgttaaacagatggttcaggggaatcctctgccgctggcctttgataccctgaatttgaacgcggcgctgaataatggccgggctcaggccgattggctaattaagctgacaaataacggccagtttaacggtcaggtgcaggtcgcggatccgcaagggcgcagaaatctctctggtaatattgctatcagtcatatttcgctggcgatgattaacccgattctcagcgacggcgagaaagccaaagggatgctgaacgccaacctgcgtcttggtggcaatgccaaaaatccactggtcttcgggcgtttggcgcttgaagacatggatattgacggtagctggatgccatttgatattactgatgggcgtctggccgtgaattttgatggcatgacctccactctggaagggttgattcgaaccacaaacgggcagcttaatcttgatgggagcgcggattggcgcaatatcgatgcatggcgtgcccgtatcgcggcgaaaggcaataagctgcgagtcactatcccaccaatggttcgcgttgatgtatcaccggatattgtgtttgaagctaccccgcagctgttctctcttaacggttctgtggatattccgtgggcgcgtataacggtacaagaagtgccggaaagcgcggttggcgtatctccggatgaagtgatgttgaataacaaccttcagcctatcgccccaagaagcgcgggtattccgattaacagtaatctgcttattcatgttggcaatgatgttcgtctgaacgcttttggcctgaaagcgcgcctgcaaggcgatctgaaaatggttcaggatcagcgcggtttggggttaaacggccaaattaatattccgtccggtagtttccgtgcctatgggcaggatctgatcgtgcggaaaggcctgctgttgttctccgggccgccggatcaaccgctgctgaatattgaagcgattcgtaacccagattctaccgaagatggcgtcaccgctggggttcgggttactgggctggcagatgcgccgcagcttgaggtgttctccgatccggtcaaatctcagcaagaggctttgtcatacttactgcgcggccagggtctgagcagttctggcaccgatagcagcatgatgacctcaatgctcatcggcatgggggtggcgcagagcggcaagctggtggggcaaatcggtgaggcgttcggcgtaagcgatctggcgttggatactcagggcgtaggagatagttcgcaagtggtcgttagcggatatgtcaccaaagacctacaggtaaaatatggtgtcggtatatttgactcattggcgacgttaacattacgctatcgattgatgcccaggttgtatctggaggcggtgtctggtattaatcaggcattagatgtgctctatcagtttgagttttaatgatgcgaattattgtctacggtagtttacggcgcaaacaaggtaacagtcactggatgactgacgctcagcttttgggtgaatatgaccttgatgggtatgaaatgtacaatttgggccattatcccgcggtcattcccggtgaaggtcaggtgcattgcgaggtttatcggataaactcagccatcatgaccgagctggatgaactgaagagtaataccaaagattataagcgtgagctaattcaaacgccttttggcagcgcctggatttatctctatcgcctgagtgttgcaggattgccgcggattcgaagcggtgactggctcaaacgccacgaagaacacgaagaaaagtgatttgaaagtaaaaaaacaccgctcattgagcggtgtttttttatggggcagcggcaagaattacttcttggccgcgcgctcgaaagaagcaacgatttcagctttcgctgctgctgcatcttcccaaccgtcaactttaacccatttgccggtttccagatctttgtagtgttcaaagaagtgtttgatctgcgctttcagcagctctggcagatcttgcacgtctttaacgtgatcgtattctttagtcagtttgctgtgcggaacggcaaccagcttggcatcttcgcccgcttcgtcagtcattttcaacacaccaactggacggcaacgaaccactgaacccggctgtaatgggtaaggcgttggaaccagaacgtcaaccgggtcaccgtctaaagacagggtgttgttgatgtagccgtagttgcacgggtagaacatggcggtagacatgaaacggtcaacgaacagagaaccggtttctttgtcgatttcgtatttaattggatcggcgttagctgggatttcgatcacaacgtaaatatcttctggcaggtctttacctgctggtactaagttcaagctcatgtcggtttccttttatcaaaccagaaatggagtgccggctattatagccaactcttttcttaattcccgtccttttcacatctggataatggaggtattagctaaatttggctgaacaagccgcgtagaaatctcgtcattgcctaatcgtatctattttcacctgttttactcgccatagctcaagaaggtatcgggtacgccgataacttatctaaataatatgcctgctcacttttagttaacgctttgtaatcttcattcttcgcagataaccgggaaaaaaagatgttaaaaaagattaccgtaaagaccgggttgatcgcccagttgagtttgatgtcgttgattttattagttgttagcgtaattggtatcaactccattcacgaaagctctaattctttgcggatcattaatcagattcagggagaggagctgggggcgttatccaatagttttaatgcgacgttaagtgccagagccgcggctgccttggctgtcaggcaaatggaaatcggcctgattgatgaatcccagaaaacggccaacaaaattgaagccgatttggcccaatctcagcaggaaatgaagcgctttattgcggcggtcactgccagaggggaaggggaagacctggcgaataatattcaaaaaagttataaattctatctcgagcaaggcgtgtttccgatgctggaagcgatcaaagcaggtaaggcggacgattactatgaagcgctggaaaaccggatttccagcatcagcggtgctttcgatggagatgtgcagcaattccgctcttatgcgctgaatgcaggccagcagcaaattgagcaagccaatagcgcggcacacattaaagttgccattattgtcgcttcggggctgataactttattttccgcgatagttgcctggtttgctttgcaaattattattctgcgtccgttggagcagtctattcatcaattggagtttattgcggccggagatctgacccatagtattaatggcgaaggtaaaaccgaactggcgcgcttggccatggctttacaggccatgcagcaatcgctggtggcttcagtgagccatgtccgggatgttggcggtcagattggtatcggatcgcgggagttagccgcaggtaatatccatctcgcgcaaagaaccgaagaatcagccgcttcgctggaacaaactgccgccagcatggagcaactgacttctacggtgaaaatgaacgcggagaattcagatcaagcaaaccgtttggctgtgagcgtctctgagatcgctaatcaggggagttcggtggttaatcatgtgatggataaaatgcaggcgatcaccaccagttcgcgaaggatttccgatattatcagcgtgatggatagcatagcgtttcagactaatattctggcgctgaatgcggcggtggaagcggcccgcgccggagaacagggacgaggttttgccgtcgtcgccggtgaagtccgtaatctggctcagcgaagcgcccagtcagccaaagaaatcaaagggttgattgtagaatcgcaaagtcgggtacgggaaggggctgatatggctgagtccgctggtaaaaccatgaatgatattgcccgcgaggtaagccgggtaacggcattaatgaaagaaatatccgctgcgtcccatgagcaaagctctggtattgagcaggttaatctggcgattacgcaaatggatcaggtagcgcagcagaacgcagcgttggttgaacaggcagcggcggcaacgcgctcgctagaagagcaggcggatgcgcttgctgccagcatggcggtgtttaagctgcagccggatgaagaaaccgtggcagcataaaaaacagcggccgtagccgctgcttgattcgatctatatggaataataattaatctgggaactgagcgataaaacgctctgcatcttccaccatagatttggtaccgacgaagaatggcgcacgttgatgcagcttctccggcacgatatccagaatacgattcacaccatcggtggctttaccgccggcttgttcagccaggaatgccattgggttgcattcgtacagcaaacgcagtttcccttgcggatggctggcggtacttggataaatatagatgccgcctttcaacaggttacggtggaagtctgcgaccagagaaccaatatagcgagaagtataaggacgctgggttgcatcatcctgctcctgacaatacttgatgtatttcttcacgccctgagggaatttgatgtagttcccttcgttgattgaatacatgcaaccggttgctggatagcgaactttctcatgggataaacagaaaacacccagcgatgggtcgtaggtaaatccgtgaacgccgtaaccggtagtgtagaccagcatggtggatgaaccgtagaccacgtagcctgccgcaacctgagcgctgcccggctgaaggaaatctttttctgtgacgggttcgccgattggcgtaatgcgacgatagatagagaaaatagtaccgaccgagacattcacatcaatattagaagagccgtctaatgggtccatcagaaccacatatttggcgttctctgctctctcaccttcgaaaataacgatgtcatcttcttcttcagacgcgatacccgcaacttcgccacgcgctttaagagcggctttcagcttctcattggcatacaaatccaatttcatctgaacttcaccctgcacattttcagcgccgctggtaccgagaatatcgaccagacctgctttattgatgtcgcggtgaatgattttagcgcctaacttgatagctgacagtaatgcagttaattcgcctgtggcgtgagagaagtcttgctgtttctcgacgataaattcgcctaacgttttcatgacacaatccctgaatctacggttgaacatcgaattactaacaaaccacttacaatatgctcgcagtgtagcccaaagctaagattgattcataggcaattccatttcttctctcggattctgagcggtagaatagccgcaaactcgatgcaatcagacggaaacatttatgcgcattcatattcttggtatttgcggcacgtttatgggggggctggcaatgctggcgcgctcattggggcatgaggtcactggggccgacgctaacgtttatccaccgatgagtaccttgttagagaaccaagggatcagtttgatccagggatacgatccggctcagctcgatcctgcaccggatctggtgatcatcggtaatgcgatgactcgcggcaatccttgtgtcgaagcagttttagaacgcggtattccttacgtttctggcccgcagtggctccacgatcaggttctgcctgagcgctgggttattgcggtcgcaggcactcacggtaaaaccaccaccgccggtatggtgacctggattctggaagcctgtggctatgagccaggctttgtgattggcggtgtaccgggtaattttgacgtttctgcccgtttaggtaacagcccattctttgtgatcgaagccgacgaatatgactgcgccttcttcgataaacgttccaaattcgttcattacagcccacgcacgctgatcatgaacaatctggaattcgatcacgcagatatctttgacgatcttaaagcgatccagaagcagttccatcatctggtgcgtttggtgcccgggaaaggcaagatcatcctgccagataacgacaaccacctgaaacaggtgatggcgatggggtgctggagtgagcaggaatttgtgggcgaaaccggcagttggtcagcgaagaaagtcacggtcgatgccagcgcttatcaggtattcctggataatgaactggttggcgaagtcaattggtcgctggtaggtgaacacaatatgcataacgggctgatggccattgctgccgctcggcacgtcggtgtacagccagccgacgcttgccgcgctctcggtgattttatcaatgctcgtcgccgtcttgagctacgtggcgaagccaacggcgtaacggtttatgatgattttgctcatcatccaacggccattctggctactttagctgcgctgcgtggcaaggttggcgggacagcgcggattttggcggtgctggaacctcgctcaaacaccatgaaaatggggctgtgcaaaaatgagctggcgccgtcactcggccgggctgatgaagtctttctgttccagccacagcatattccgtggcaggtggtggaagtggccgaagcctgtattcaaccggcttcatggagtgctgatattgatacgctggtagaaatgatcgcgaaaaccgctcagccgggcgatcacattctggtcatgagcaacggtggtttcggcggaatccatagcaaactgctggaagcgctggagaaaaaggcgcatcagcagctattgaactgatttagataaaaaaagcccccgaaagggggccaaagggttcgctggataggacagcgagggattatctagcattgctctttcttacttttttcttgctcttgctcaatagacttatgttcatctgtttatagttaaaagattattgagcaagcttgtctgtttgggatttgccgcttaaaacaccgtgcattcgcccttatttgtaaatcttggctgttgcatgccagccattttcctgacgcatttcaatgattttatacgctgtagcgcctttgctatcggctttgtcggccagtgcctgagtaatatcagaaggcgcgccggtgatgccactcacgctgatggttcccatatcggtcaggctgttagtttgagcattattaacagactcggcggctgaagcgccaaacgcgataacggaaaataagcctagtgcagcgatggtatttttgattttcatgatctcttcctaaaaatagccaacaaccagaaagcattattatcgattctgctacttagaggctgttgttttgattgtgtttctattctgactgaatctggtaaggcgatgcgccaggtcagaatttactggtagatttttgctgtagcgtggaagttgccgtcttcgcgagcttcgataacctgataagccttggcgccttgtgcatctgctttgtcagacagtgcctgacgaatatctgaaggcgtcccattcacaccgctaacagtaatggtgccaaccgattgtaagttagccgcttggcttgcgttgattgaatcggctgcaaatacgccaaatgacagtgcagaaagaacgcttaatgctgctacggtagttttaatgttcatgttatggcctcttaatattcttttattagtttgcgtaaatgtgatttacgtcacgaaatgagtatacatctagtcacccgaaacattaatagcgggctaataatatttagcgtgactttaatgtgagttattagtttttaataaccaaacggaataaaaatcgatcaaaaaatgagtgattgaggcaaaaaagtagatatttcaaatgagtgggtgtttttgaccaaaagtgcgaaaattttagcgtgtattcgctgtttaatgaaaaagggtcattttccgtgccggttagatgagaaaatccagtgatattcactacatgcagtatgcctcttgggaaatagctcagaggctagttatatctataggatgataacgagcaaaaaagcgaagctgcatggcttggaaaggatggctgatgcaaggtaaaggaagatgactaagggaataggctgtcgcagatcgaagatggcaaagggattgaaatgcagagtatgtactgtaaaaggccaatagaaccttgattctactggccgcgatctgattggctgggattacagctcttggtcgaataaacctaaaatggcgtcatgcagctgtttaacactaaagcctttagctggcgtggtgaaaattgtgtcatctccggcaatgctacccaggatgccttcggctttccctaatgaatctagcaggcgggcgataagctgagcagcaccagggctggtgtgaatcaccacgacagaatcattataatctacgtcgagaaccagatttttcagcgggctgctggtcgttggaactcccaattctgctggcagacagtaaaccatctccattttcgcattacgggttctaacggcaccaaacttggtcagcatgcgtgatactttggattggttaatgttttcaaacccttcctcctgcaatgccaaaacaatctcgccctgagaactgaatttttcctctttcaataacgctttaaacgctttgataaggtcttcttgttttgcgggatttcgcatttttcacctgggggaatggagagttaggaagccaattatgcatttaaatgaatttttattcaacattagcatgcgtaggaagtaataaaagctcttatatcaaagcagatgacaatttagcgtaaatatatctctaactattatgcctaagctaaatgcatagcaatcaaacagtcgtgataaaaatgttattaaaatgatgttgttctgatgttatggaagggtgtaatgtaaccgccgattaacctgttgtggatgcttaaattatttttagaagaatgtgcgctatatcattaatcgataagcgaattactctaaaataagccgacttcacacccgtttttaatgcgtgatctctcaatctgactgttaatagattgtgtttaaaatcgcaataaactaaggtgcgtaaatagatgaattcacggcaaatttaaattatatataacaaggagtataggatgaaagttgcagttctcggtgccgctggtggtatcggccaggccctcgctcttctactcaagactcagcttccttcaggttcagacctttctctgtacgacatcgctccggttactccgggtgtagctgtagatctgagccacatccctacggcagtcaatattaaaggttttagcggcgaagacgctaccccagctctgcaaggcgctgatgtagttctgatttctgccggtgtagcccgtaaacctggcatggatcgttcggatctatttaatgttaacgctgggatcgttcgtaatctggttgagcaaatcgctcgtacttgcccaaaagcattgatcggtattatcactaatccagtgaacaccaccgtagctatcgcggctgaagtactgaaaaaagctggggtatacgacaagaacaaactgtttggtatcaccactctggataccattcgttcaaacaccttcgttgctgaattgaaaggcaagcagcctcaggatatcgaagtgccggttattggtggtcactctggcgtgactattctgccattgctgtcacagattcctagcgtgagcttcaccgagcaggaagttgccgacctgaccaaacgtatccagaatgcgggtactgaagtcgttgaagcaaaagccggtggcgggtctgcaacgctgtctatgggccaggctgctgcgcgtttcggtctgtctctggttcgcgctctgcaaggtgaaagcggcattgttgaatgtgcatatgtggaaggcgatggcaaatatgctcgcttcttcgcgcagccaattctgcttggaaaacaaggtgttgctgaacgtaaagacattggcaaacttagtgcctttgagcaaaatgcattagaaagcatgctagacgtgctgcacaaagatatcgaactaggcgtagatttcgtcaacaaataacaattgttgattgaaaacagcggggggttattttcccttgactgtttcgtctaagaagccgctggtggcaagcaccggcggcttttttatgtcagtaagttatgactgtgctgaacgaatacgcgttttcctatccagtaaggcccctgttctagcgtcaaaatagcgggaaggccagatttccgagggatgaatctccagacattccgcaattagccactcacctttcggccagggacgagtcagggcattggctagcgttgatgagctaagaccggcatttcgagacaacgccgccagggttgttcctttcttccgcagtgccgcaataacgtcggcagggtgccaatcagatttccttaaaatcatctttaatccttttttttactaagctgctggcatgttagtggtataactaaccgtgtatcgttaatcatattacgaacgaaaagtaatcatttagaaacaggataacatcaaatttccaaatgattttcaaatattttctaaaaattccttttttgcgtgttaccgcatagtagagaagaaaggctatgaaaaaagagtggtttgctgccaaggaactgacaggtatcgcggggttgccctcgtctccacaaggaatcaacctcatggcaaaacgtgagggttggaaacaacggcgtcgccggggagttcagggtaaagcggttgaatatcatatagatagtttgccggtaagcgtgcttagtctgctacgactcaaagaggacccggtagattatgtcgtcacgcgacaggaaccgatagcggtatgggtagaggcctactatcagttaaccgaagcggagcgcgacaaaatcatcagttttattttgcgtgaagggattggttcgttaatgacgcgtttagccattacctgattaatgctgagcggggcatctattttattgcgctgttcggatgcccgaattgttgagtaaatccgagagtagatcatccatgaagaaacagtggttttcagccagggaattaacaggcatcgcaggattaccctcctcgccacaaggaatcaaccagatggccagacgcgaaggctgggaactacgccgccgacgtggagttcaaggtaaagctattgaatatcatgttgatagcttgcctgggcaagtgctggatatgataaggatgagggaggaacctgcggaatatatcgttgccagacaggaccctttgcaggtttggattgaagcttattaccagttgacggaggaagaacgcgatcaaattattgcgtttattttccgtgagggcgtcgcaacattaatggcgcgtttggttaatcgttagcgataaatcaggaaaacaacccagtcgttatttaacttccgggttgtttctttaagtttctcaaaaatctcgctgtacggctatatgcgctaaaccttccagcgctaatcgatgcggagtttctggcaatatctgcaatgcggcaattgccttgtcagcctcttcttccgcacgctgacgcgtataatccagagagccacattggcgcatggtttccagaacgggttccagcaaatggcgaccatttccttcttcaatcgctttgcggatcagggcagactgctcgggattcccgttattcatggcatgcagcagcggcaaagtcggtttaccttcatttaggtcgtcaccggtatttttaccgagagtggagccatcggagctgtaatctaacaaatcgtcgataagctggaatgcagtgccaagatagcggccataatcctgcagggcaatttcctgctctggggttgcgtcggcaagaatggcggaagattgagaggctgcttcaaacaggcgggccgttttactgtaaatcacccgcatatagctttcttcggtaatatctgggttattacaattcattaattgcagaacttcaccctcagcaatcacgttggtggcctctgacatcaattgcagcacgcgtagagaacccagactggtcatcatctggaaagagcgggtgtaaatgaaatcaccaaccagcacgctggcggcgttaccaaaggcggcattagccgtcgctttaccgcgacgcatatcggattcatcaacaacgtcatcgtgtaataatgttgcagtatgaataaattcaattaatgcggcgatagtgacatgtttatcgccctgataacccagcgctcgggcaaccagcaccgcaatcatggggcgaatacgtttcccgccaccgctgataatgtagtaacccaattgattgatgagcgttacatcggagttcaactggtcgagaattgttgcgttcacggccgccatatcctgcgcggttaactcgataatcttttctaggttcattgttttattcagctgtttttctctttaactacgatgacatcgccgctaacattattacatgacgttccctgagaccatgattgtacttgaaaaacgcgttaaataaatgacatgtaagaaactgcgctttttttcttcgtttgcagctattctgcgcttgtcatccgatccgtttttgcgtagaattcgcgccctaatatgaatatttatagtgcgctctggactacttaagtagggtgcacggaaagcggagttttatatgtacgcggttttccaaagtggtggtaaacaacaccgagtaagcgaaggtcaaaccgttcgcttggaaaagctggacatcgcaactggtgaaacaattgagtttgaccaagttctgatgatcgctaacggtgaagaaatcaatatcggcgctcctttagtcaatggcggtctggtcaaagctgaagtagttgctcacggtcgtggcgacaaaattaagattgttaaattccgtcgtcgtaagcactaccgtaagcagcaaggtcaccgtcagtggttcactgatgttaaaatcaccggtatcagcgcttaagttttaggagagcggacaaatggcacataaaaaggctggtggctcgactcgtaacggtcgtgactccgaaagtaaacgtctaggcgttaagcgttttggcggcgaagcagtattggcaggcagcatcatcgttcgtcaacgtggtactaaattccacgctggcatcaacgtaggttgcggtaaagaccacactctgtttgctttggctgacggtaaagtcaagttcgaagttaaaggcccgaaaaaccgtaaatttatcagcatcgaagctgaataagtttttcgcgtcctgctaatagatgtaagccctgcaattttgttgcggggctttttacatttctgggttgaccttacctgagtgaagtcatgaatacgaaacagcaggccggtttaggcattcttcttgcgttaacgactgccgtattctggggtattctgccgatagcaatgaagcaagtacttgaagtgatggacccttttaccatcgtctggtaccgctttacgcttgcgtctttgggcctgggattgattttggcctccagacggcaattgccttctctcacgttatttcgtcaacctcggtggttgttgttattggttattgccacctgcggtttgctggggaactttctctttttcagctcatcgctacagtatcttagcccgacggcgtctcaggttatcggacagttgtcaccggttgggatgatgatcgccagtgtgctgattttaaaagagcgcatgcgaattacgcaggttatcggcgcagcgatgctgatttgcggtttgatgctcttttttaacaccagcctgctggaaatctttaccagactgacggattacaccctcggcgtggcattaggcgtgtgcgccgctatggtttgggtgagctacggtgtcgctcagaaggtgctattaagacgcatggcatcgcaacagatcctcgtcttgttgtacactttatgtgcactggttctgtttccgctggccaaacccggcgttatttttcagttaagtggatggcaactggcgtgtctgctgttctgcggggttaacaccctggttggatacggagctttggctgaggccatggcgcgttggcaggcggcgcaggtaagcgctttagtgacgctgactccgttgtttacactgattttttcaaatttattagcgctggcgtggccagatatgtttgccgcacctcccctcaatgccgtgggctacgtaggggcgtttgtggtggtggcaggtgcaatgttttccgcaattggtcatcgatggtggccacggcggacagaaacaaccctggttgctccgttgaagcagcccggtgaatgatttacggagagagacatgaagtttgtagatgaagcggcgattctggttgtagccggtgatggtggtaacggttgtgtaagcttccgtcgtgaaaaatatattcctaacggcggcccggacggcggcgatggcggcgacggcggtgatatctacctgctggctgatgaaaacctgaataccctgatcgattaccgctttgtgaaatctttccgcgctgaacgtggacagaatggccagagccgtgattgtaccggtaaacgtggtaaagatattaccatcaaagtgccggtcggtacgcgtgtactggatcaggataccggtgaagttatcggtgatatgactcgtcacgggcagcgtctgatggttgccaaaggcgggttccacggtttgggtaactcccgtttcaaatcttcggttaaccgcgcaccgcgtcagaaaaccatgggtactgaaggggaaactcgcgaactgatgcttgagctattgctgctggctgatgtcggtatgctgggtctgccaaacgcaggtaaatctacctttatccgtgcggtatctgcggcaaaaccgaaagttgccgactatccatttaccaccttgatcccaagtctgggcgtggtgcgtatggatcatgagcaaagcttcgtcgttgccgacatccctggtttgattgaaggggcttcggaaggcgctggtttaggtattcgcttcctgaaacatttggaacgttgccgcgtactgttgcatctgatcgacatcgcacctattgatgaatccaatcctattgagaatgccaaaatcattatcaatgaattgcagcaatacagtgaaaatctggccgagaagccacgctggttggtatttaacaaggttgacctgttagaccaggctgaagcggaagaacgcgctaaggcgattgcagacgctctgggatgggaggataagtattatatgatctcggccgccaaccgcgaaggcgttaacgcgctgtgctgggacgttatgaacttcctgaatacccaacctaaagctatggcaattgctgagactgcccctgagaaagtcgagttcatgtgggatgattatcaccgtgaacagctggcagaagtggaagatgaagcgaaagacgaatgggatgacgattggaatgaagaagacgacgatggcgttgagttcatttacgagcgttaatctcagacatcagttttgagctaaaagaggctgcctgcgggcagcctttcgttttttgggcttattgctgatttggcaaccagcactgggcgttcaatccctgtcgatcgctgcggttctccagcgacagttttccctgatgcaactgtgcgattctcaatacgatattcagccccaatccgcttccaccatagcgttgatccatacggcgaaaagcctgcgtcagctcgccaatctggttctccttaatccctgggccttcgtccaaaacctgcaacagtacaccgctatcctgcgatgtcagtttaacgataatcaggctgtctgaggggctatagcggtgagcgttctccaccagattacgcagcattaaacgcagcagggcggcttcaccttgaatacaggaacgttctggtaaaatccattggagacgctgtttacgctgcgccgccatttcggccagttcttcccgcaacggttgcaccacatcctgaatccagtcaaaagtctgatattgtccgctggcaaaattctgccctgcgcgtgacagcatcaacagttgttcgatggtatgcatcaataaatcgaggcgattaattagcactttgctttccgctatgccatttttttccatcaattccagatgaaggcgaatgcccgccagcggtgtgcgtagttcgtgggcggcatcggcagtgaaacgacgttcttgctgaatggtattggaaaggcgggaaaacagctgatttagcgtgccggtaacggcgacgatttcctgcatatcacttttgataaccagcgggctaaggttgtccgcggagcgttcagaaagcttgctctgaagttgatccaacgggcgtatgatccaactgatagcccaaaaagaggcgaggagagtgatgatcatcataatcagagaaggggccagcagtgaagcgatggcctccgcaatttctgtgtcgactttttcatttctgactttggcggtgagagtttcatctactaaaaactgaatttgttcctggctctcatgccacagccacagcgcgctaattaactgagtgactaatagaatcagcgctagcatcagaatcagacgacgacgcatgctgatcatgataagacttccagacgataaccaatgccccgaaccgttcggattcgatctttacccaattttcttcgtagattatgaacgtgcacttcgagagtattcgagccaagatcgtcctgccaagtatagagatcttgctgtaacagctcccgattgacggtgtgcccggcgcgcataatcaggcgggaaagaatggcaaactccttcggcgtgatttccagcggctgttcctgtagataaacctgttgagttgccagattgaggctcaaattcccttgttgaagcaaattatcactttgcccctgatagcggcgaatcagagcacgcacgcgagccaataattctgccagcgcgaaaggtttaatcaaataatcatcagcgccagcatccagcccatcgacgcggtcttccaacgcatcgcgagctgttaatatcagcactggcaggctaatactctggcggcgccattggcggagcaacacggcaccatcctgatctggcaatcccagatcgagaataaccatgctgtactgactggtgataatcagaccgttggcttcagccgcggtactggcgcaatcgcaggcgtaaccctcactggtgagggccatggcaatgcctttttgtaacaactcatcatcttcgacaatcagtagtttcatggttttcagttattctgataaatatctttgtacaggcggctttcaaatcgaaccagcggcgcccggcggtttttttgatcttccggtggaacggcatagccagacaggaactggacaaacgccatgcgctgaccgctggcggtagtaataaagcctgccagattgtagaccccttgcagcgccccggttttggctgacactttgccatcaaccccggcttcgtgcagaccaccgcgatagcgcaatgtgccgtcataacccgataatggcagcatggagatgaagttaagttcttgatcgtgctgggcaatatattgcaatgcctgcatcatggtcgcaggagcaataagattatggcgcgataagcccgaaccatccaccacgatgctatttccgaggtcaactccagctttctgacgtaaaacctgacgtactgcgtcagcgccggctcgccaggtgcccggtacgccgaaacgctgatggccaatagttcggaaaactgtatcggcgatcatattgtcggattttttcagcatgatttttagcaagtcatgcaacggagcggattgtgcctgcgccaacacgctgccagccgcgctcggcgtagtttggcgtcttagattaccgtcaatctgaatatcggctttttttagctcgtctttcaaaatagcaccggcatagctagcgccgttttgcaccgcaaaggctaagggcaggggttcgctgcgttgagtcaggcagccggtaagggtaaagcggttgagttcgccgggaaccacatctagttcgcaatattgggcatccggcgagccttttgccagagtgcgaacttcgctaaacatttgtacgggatagtaagaagcgacgcgaataaaggccatatcgccgggattcggtgcgctgtacagcgataccgagaaacagttgcgatcgacaattgcggccgctggcggtgcgctgaagcactgggtcatatcgttccacggccagccgggcgctttatcatggctggcaaaaaccgaggtatcgataatcaaatccccggcaatttggcgtagacccgattttttcaacgttgttaccatatttcgcagttgctggcgggttaaggtcggatcgccatcgaaacgggcaatcagattaccgcgcagaacgccgtcagttatcggcgcatgactttccagcgtggtaacgaaacgaaaatcaggccctagctgcaacagggcggctagcgctgtcagtactttctgagtactggccgggagtgccatttgctgggcgtgatagtctatcaccggagttgtcgccccgattttttgcaccactaaagcaagattcgccccatcgggcagatactgcgtgtaattttctacctgcgccgcattggcattgaatacgctgatgttgatcgcaaaaacgcaggccaatttactgactattcgtgaaaaatgcataatttcggtataactgctgggtaacgtacagccatactacggtgcaacgagggcgaaagtaaacgatgaccctaaaggaactctacgttaaaatgtttatcaaaatgcaaaatcgatcctaacttggagttttagctccgggagggttttttttgttaatcgcctggaggcgggtaggattttaggctagccgtattttcattcgaaaacgtcaggatgacgattatttgaacaggatagatttagaggtatttaacagatgaaacagattccgatgacggtacgtggtgcagatcaactgcgcgaagagctcgaatatttgaagggcgtgcgtcgcccaaagattatcgctgatattgcggatgctcgcgaacacggcgatttaaaagaaaatgctgaataccatgcggctcgtgaacaacaggggttctgcgaaggccgtattcaggaaattgaagcgaagttatctaacgctcaggtgattgatatcaccaaaatgccgaataatgggcgggttattttcgcttctacggttacagtgttaaatctggacacggaagaagagcagacctaccgtattgttggtgatgatgaagcagattttaaacaaaatcttatttcagtaaattcaccgattgcccgcggcctcatcggtaaagaagttgatgatgtggtggttattcgtactccgggcggtgatgtagaattcgaaattcttaaagtcgaatatctgtaatacggctgatttgagcaataagtaagcagatatttgtaaagaaaagaaaaaaggccgcaagcggccttttatcagaactaagtgcatggcaccttttctttaaaacgaacgtcattaacgcggtaaaataatcttgcgctctttcgccgggcggtagagtactaaaatattaccgataatttgcacgttaactgcaccggtttcacgcacgatagcatcagcgatcaaggttttggtttcacgctcttcagcagtgatttttaccttgataagttcatgatgttccagtgtttgttcgatctcagccagcaccccttcggtcaagccgttattgcccagcatgactactggttttaacggatgggccaggcttttcaggtgctgtttttgtttgttattcagattcatcgtcttttttgcttaagttgggattgaaaacggttcattctaccgccatctcatgtgtatcaccaaatcggtcttttaccggttagggagtctacgcgagctaagcaatagatgcgcgggctcttaattaggatagttggaaaaagagatggccaataaaaagcgttcagctagctccagtcgctggttacaagaacactttagcgataaatatgtgattcaggcacagaaaaaagggttacgttcgcgcgcctggtttaaacttgatgaaatacaacagagcgataaactctttaaacccggtatgacagttgtggatttaggtgcagctccgggcggctggtctcagtatgtagttactcagatcggtggtaaaggtcgaatcatcgcttgcgatcttttaccaatggatcctatcgttggagtcgatttccttcaaggcgacttccgtgatgaaatggtgctgaaagcactgcttgagcgggtaggtgagaaaaaagttcaggtggttatgtctgacatggccccgaatatgagcggtactccggcagtcgatatccctaaatcgatgtatctggttgaattagcgctggatatgtgtcgtgatgtattggcaccaggcggaagtttcctggtgaaagtgttccagggagatggctttgatgaatacctacgggaaattcgctccctgtttacgaaagttaagattcgtaagccagacgcttctcgtgcgcgatcgcgagaagtgtacattgtagcgacagggcggaaactgtagtaccctaacgctgtttgttaacacagttgtaatatgaggttaatcccttgagtgacatggcgaaaaacctaattctctggttagttattgcagtcgtactgatgtctgtattccagagctttggtcccagcgaatcgaatggtcgtagagtggattactctactttcatctctgacgtatcccaagatcaggttcgtgaagcacgtatcaacgggcgtgaaattaatgttagcaagaaagataacagcaaatacacgacctttattccggttaatgacccgaaactgcttgataacctgttgactaaaaatgtgaaagttgttggtgagccaccggaagaaccgagcttgctggcttctatctttatctcctggttcccaatgttgttgttaattggggtctggatcttctttatgcgtcaaatgcagggcggcggcggcaaaggggcaatgtcctttggcaagagcaaggcgcgcatgttgactgaagatcagattaaaacctcttttgccgacgttgcaggctgtgacgaagcgaaagaagaagttagcgaactggttgaatacctgcgtgagccgagccgtttccagaagctgggcggtaaaattccgaaaggcgtattgatggtgggtcctccagggaccggtaaaaccttgctggcgaaagccattgcaggggaagctaaagtgccattctttactatttccggttctgacttcgtcgaaatgttcgttggtgtgggtgcatcccgcgttcgcgatatgttcgagcaagctaagaaagctgctccatgtatcatctttatcgatgaaattgatgcagtaggtcgccaacgtggcgcaggtttgggcggtggtcacgatgaacgtgagcaaaccctgaaccagatgctggttgagatggatggcttcgaaggtaatgaaggcatcatcgtgattgcggcaactaaccgtccagatgttctggatccagcattgctgcgtccgggtcgtttcgaccgtcaggttgtagttggtctgccagacgtgcgtggtcgtgaacagattctgaaagtccatatgcgtcgcgtaccgctggatatcgatatcgatgcgtcagtgattgcccgtggtactccaggcttctccggtgctgatttggctaacctggtcaacgaagctgcgttatttgccgctcgcggtaacaaacgcgttgtttcaatggtcgagtttgagaaagctaaagacaaaatcatgatgggtgcggaacgtcgctccatggtgatgaccgaagcgcagaaggaatctacggcatatcacgaagctggccatgcgattatcggtcgcttagtgccggagcacgatccggtgcataaagtgacaattattcctcgtggccgtgcgttgggtgtgactttcttcctgccggagggcgatgcaatcagcgctagccgtcagaaactggaaagccagatttctacgttgtacggcggtcgtcttgctgaagaaatcatttatggcccggaaaaagtgtctaccggtgcttcaaatgacattaaagtagctacctcaattgcacgtaacatggttacgcaatggggcttctcagaaaaactgggtccgctgctttatgctgaagaagaaggcgaagtgttcctcggtcgctcagtggcaaaagctaagcatatgtccgatgaaaccgcgcgtatcatcgatcaggaagtgaaattgctggttgagcgtaactatcagcgtgcacgtaagttgctgatggaaaacatggatgttcttcattccatgaaagacgcgctgatgaaatatgaaactattgatgcgccgcaaattgatgatttgatgaatcgtaaagaagttcgcccgccggctggctgggacgacgctacgaagaataaatcatctgatagtgacaatacgcctcaggcaccaacgcctgttgacgaaccgcgtaccccaactcctggcaacaccatgtcagaacagttaggtgataagtaagcggattgttggcatctaaatgcgtagtgattaatataaccccgggcttgctcggggtttttctttttctggccgggataaattgaagtgcttaaccatttttaaggtaaataacgatgtatttgactgccagggatctgactcttgatctctcacaccctcaggttatggggattttgaacgtcacccccgattcgttttccgatggcggacgccacaacgatctcgataatgcccttcatcacgcgcaggcaatgattgccgcaggtgcaactctgattgatgtgggcggcgagtctacccggcctggagccgctgaaattagcgagcaggaagaattggatcgagtgattccggtcgttgaagcgttggcgaaacgttttgagatctttatttcggttgatacttcaaaagcggcagtgataaccgaatcagccaaagtcggcgcgcatctgatcaatgacgttcgttctttgcaagagccgggcgctctggatgccgcggccgcgacgggcctgcctgtctgcctgatgcatatgcaagggcaaccgcagagcatgcagcaatcccctcactacgatgatttactggcggatgtgaaccagttttttgaacatcacattgaacgttgtgttgcggcaggtatcgcaaaaagtaaattgttactcgatccgggattcggttttggtaaaaatttagcgcataattaccagttattggctcggttggcagaacttcaccattttgagcttccgcttttggtcggaatgtcgcgaaaatctatggtgggtcagttacttaatgtaccacctcaacagcgagttattggcagcgttgcctgtgcagtcattgcggcaatgcagggcgcgcagatcgtcagagtgcatgatgttaaagaaaccgtcgaggcgatgcgtatcgtcgaggcaacactttcagcgaaggaatagagagaaattatgagtgaccgtaaatactttggtacagatggcattcgcggaaaagtaggtgacaacccgattacgcctgagtttgtattgaagctcggttgggccgcagggaaggttctggctcgtcatggctcgcgcaagatcatcattggtaaagatacgcgtatttccggttacatgctggaatcagcgttggaggccggtctggctgccgctggtttatctgcgtcattcactggcccaatgccaactcctgctgtggcttacctgactcgcgctttccgagcggaagcgggcatcgttatttccgcctctcataatcctttctatgacaacggcattaaattcttcgatattgatggtgcaaaactgcctgacgaagtagaagaagccattgaagcggagatggaaaagccactgacttgcgttgagtcatcagaattgggtaaagccagccgtattgttgatgcagccggccgttatatcgaattttgtaaaggtaccttcccgaacgaattaaatctgaacggtttgaaaatcgttgtggactgtgccaacggtgcaacctatcacattgcgccaagcgtattacgtgaactgggcgctaccgtgattgccataggctgtgagcctgacggtatgaacatcaatgaagaatgtggtgctaccgatgttcgtatgctgcaagagcgcgtattggctgaaaaagcacacgttggtctggcctttgacggcgacggcgaccgcctaatgatggttgaccatttgggcaataaagtggatggcgaccagattctttatattattgcgcgtgaaggcctgcgtcagggtcagctgaaaggtggcgctgttggtacgctgatgagcaatatgggtctggagctagcgctgaagcaactcggcattcctttcgctcgcgcaaaagtgggcgaccgctacgtgttggaaaaaatgcaggaaaacggctggcgtatcggggctgaaaactccggccatgtgattctattggataaaaccaccaccggtgacggtatcgtagcaggtttgcaagtgctaactgcgatggtgcgtaacgacatgagcctgcatgatctgtgcagcggcatgaagttattgcctcagatactggttaacgttcgtttctccggtaatcacaatccgctagagtccgaagccgttgttgccgtgactcagcaggtcgaggctgaactggcggggcgtggccgcgtgctgttacgtaaatctggcactgaaccattgatacgcgtaatggttgaaggcgatgaagaggaagagctaattaagtctctggctcatcgtattgccgatgcggtaaaagcagcaggttaatggctttattttaggggggaggacgccgctcttccccgtagaattgtccgcaagttgagtaacctggctgttttttctgcaaatgagcccggttaatgaaattgcccttgcgtgtattaaccgctttggttagtattcacacccgcttaagtgggtgaatgaattcccgctgttatgggtgaaaagcatttggcatgcggtgaacccgcaaggatacaggtacaactatgtacgaagctcttctggtaattttcttgctgatttcgatcgggcttgtggctctgatcatgttgcagcaaggtaaaggcgcggatatgggagcctcattcggagcaggtgcttctgccactctgttcggttcgaatggttccggtaacttcatgacccgtatgacggctgtcttggcgactttatttttcgtcatcagtctgattttgggcaatatgagcaccaaccagggccgtaaaggcagcgagtgggaaaacctgggtcagccagttaaagctgagcagactacagcgccggtagcaccagctaagccgagcagcgatatcccgcagtaagaaatagtaagttgttgtaacgtcgtaagatagtacagaaagaaagttgaagaatggttgtggcgcttggacagtaaagcagaccattaatatcagtgccgtggtggtggaattggtagacacgctaccttgaggtggtagtgcccgattgggcttacgggttcaagtcccgtcctcggtaccaaacagatagataacttgcttttttatcgttatcgacgtagtatttgccacgttttcggacgcggggtggagcagcctggtagctcgtcgggctcataacccgaaggtcgtcggttcaaatccggcccccgcaaccactttcctaaagtgttttttttcaaatagtagtattcgcagtcctcaatactttcgatttcaatttgaaaaaaatacttgtcagaaagttgtaccgaagccgcttagcggcaaacagggtccagttgcataaagccccgaatttcggggttttttgttatttgacagcagaatcactgggctattaagccctttttttatgtcttgggggtgggcttgtccacattagaacaaaagttaacagagattatttcagcaccggtcgaagcgttaggctacgaattagtcggcatcgagttcatccgggggcgccaatcgacgctacgaatctatattgatagtgacgatggtatcactgttgatgcttgtgctgatgtcagccaccaggtcagcgctgtattggacgtagaagatccaatcacagtcgcttacaacttggaagtttcctctccgggccttgatcgccctatgttcaccgccgaacactatagtcgttaccttggtgaaacagtcatcctggttttgcgtatggcaatgcaaaaccgccggaaatggcagggtattattaaagctgttgatggtgaaatgatcacggttactgtggatggaaaagatgaagtgttcgcgctgagcaacatccagaaagcgaacctggtaccccacttttaaagtttggatgaggcaactaggatgaacaaagagattctggctgttgtagaagcagtttccaatgagaaatcccttccgcgcgagaagatttttgaagcgttggaaaccgctctagcgacagcgaccaagaaaaaatacgaacaagaaattgaagtccgtgtcagcatcgatcgtaaaaccggcgatttcgacaccttccgtcgttgggtcgctgttgatgaagtgacgatgccaacgcgtgaaatcacgctggaagccgctcaatatgaagacccaagcattcagttgggcgattatgtcgaagatcagattgaatccgtaactttcgaccgcattactacgcaaaccgcgaagcaggttatcgtacaaaaagtacgtgaagctgagcgtgcgatggtggtcgagcaattccgtcagtatttaggcgagattgtcacgggtacagtgaaaaaagttaaccgcgatagtatcgcgctggacttgggtaacaacgctgaagcggtgattggccgtgaagatatgttgccacgtgaaaacttccgtccgggcgaccgcatccgtggtgttctgtacgacgtgcgtcctgaagctcgcggcgcgcagctgtttgtcagccgctcccgttcagaaatgctgattgaattgttccgtattgaagtaccagaaattggtgaagagttgatcgaaattaaagccgcagcccgtgatccgggttctcgtgctaagattgcggtcaaaaccaacgataagcgtatcgatcctgtgggtgcctgtgtaggtatgcgcggtgcgcgagttcaggccgtttccagcgagcttggcggcgagcgtatcgatatcgtgttgtgggatgataatccggctcagtttgttatcaatgccatggctccggctgatgttgcgtcaatcgttgttgatgaagaccgacacacgatggatgtcgctgttgaagccagcaatctggctcaggcgattggccgtaacggtcaaaacgtccgtttggcttcacagcttagcggctgggagctgaacgtgatgacagcagatgatcttcaggcgaaacatcaggctgaagctcatgcggcgatcgataccttcaccaaacatcttgatattgatgaagatttcgccactgtgttggttgaagaaggtttctcttctctggaagagttggcttatgtgccaatcaacgaactgttggaaatagatggccttgatgaagatatggtagaagcgctgcgtgagcgcgctaaagctgcattgaccacgctggccctggcacaagaagaaagtcttggcgatcaaaaacccgcagatgacctactgaatttggaaggtctggaacgtagcatggcatttaaattggctgcgcgcggtgtgtgtacgctggaagatcttgccgagcagggtatcgacgatctggcagatattgaagggttgagcgatgagcaagccggcgagctgattatggccgcacgtaatatctgttggtttggcgataatgcgtaataaactgtagcaggaaggaacagcatgacagatgtaaccgttaaatcgctggcagcagagattcagaccccggttgatcgcctggtacagcagtttgctgatgcagggatcaagaagtctgaagtagactccgttacccagcaagaaaaagaaacattgctggcgcacctgaaccgtgaacacggcagcgcgccaaataaactcacgttgcaacgcaaaacgcgtagcaccttgaatattccgagcaccggcggaaaaagtaaatcggtgcaaatcgaggtccgcaagaaacgcacttatgtaaatacgccggaagctgaacaagcgaaagcggaagagcaggcacagcgtgaagcggaagagcaggcacaacgtgaagcagcagcggcagcgcagaaaatcgctgaagaaaatgctaaacgtgcggccgaagaacaagccaaacgtgaggccgctgaaaaagctaaacgccaagcagcggaaaaagaaaaagtgacgaatcaacaaaccgacgaaaaaaccaagccagctcagaccgataaagcacgccgtgaagctgaagctgccgagctgaaacgctctgtagaagaagaaacacgccgtaaggtcgaagaagacgcgaaacgcgttgctgaagaggcccgtaaaatggcggctgaaaacgaaggtaaatggccagaacctgtggctgagcagaccgagtctgctgactaccatgtaacgacctctcaacatgctcgcgccgcagaagatgaaaacgacgcgaaagttgaaggcgatcgccgtagccgcactcgtggtggcaaagcgactaaacagaaaaaaggcaataaactttccgagtctaaagccgatcgcgaagaagcgcgtgccgttggccgtaagggtaaacgtaagccaagcactttgcagcagagcttcaacaagccagtggttgcggtaaaccgtgacgtagtgattggcgaaactgttaccgttgccgaactggctaacaaaatggctgttaaaggttctcaggtcatcaaagcgatgatgaaactgggtgcaatggcaaccatcaaccaggttatcgatcaggaaacagctcagctggttgctgaagagatgggccacaaagttatcctgcgtcgtgaaaacgagctggaagaagcgctgatgagcgaccgtgatacaggtactggtattgcagctgagtcacgcgctccagttgtcaccatcatgggccacgttgaccacggtaaaacctctctgctggactacatccgctccactaaagtggcgtcgggcgaagcaggcggcattactcagcacatcggtgcttatcacgttgaaactgacaacggcatgatcaccttcctggataccccaggacacgcagcgtttacttcaatgcgtgctcgtggtgctcaggcgacagatatcgttgttctggttgttgcggcagacgatggcgtgatgccacagactatcgaagctatccagcatgcgaaagcggcgaacgtgccggttgtcgttgcagtgaacaaaatggataagccagaagccgatccagaccgcgttaaaaccgaactgtctcagtacggcatccagccggaagagtggggcggcgagtctcagttcatcaacgtgtctgctaaagcgggtacaggtattgacgaactgttgaacgcaatcctgctgcaagctgaagtgctggaactgaaagcggttcgtagcggcatggcaagcggtgtggttatcgaatccttcctggataaaggccgtggcccagttgctaccgtgctggttcaagaaggaacgctgaacaagggcgatatcgtactgtgtggcttcgagtatggccgtgtgcgtgcgatgcgtgacgaattaggtcgcgacatcacctccgctggtccgtctattccggttgaaattctgggtctgtccagcgttcctgctgccggtgacgaagttaccgttgttcgtgatgagaaaaaagcgcgtgaagttgcactgtatcgtcagggtaaattccgcgaagttaaactggctcgtcagcagaaatctaaactggaaaacatgtttgcgaacatgaccgaaggcgaagtttctgaactgaacatcgtaatcaagtctgacgtacagggttcttgtgaagctatctgtgattcactggaaaaactgtctaccgacgaagtgaaagtgcgcattgtgggttcaggcgttggtggtatcaccgaaactgatgcaactctggccgctgcttctggcgcaatcattcttggctttaacgtccgtgctgatgcttcagcccgtcgcgtagttgagactgaaggcctggatctgcgttactactccgttatctatagcctgattgacgaagtcaagcaggcaatgagcggtatgttggcaccagagtacaaacagcaaatcattggtctggctgaagttcgtgatgtatttaaatcaccgaaattcggcgccattgctggttgtatggttaccgaaggtgtgattaagcgtaacaacccaatccgcgttctgcgtgacaacgtggttatctacgaaggcgagctggaatctctgcgccgcttcaaagatgacgtaaacgaagtccgtaacggtatggaatgtggtatcggcgttaagaactacaacgacgtgcgtactggcgatatgatcgaagtattcgaaatcattgaaatcaaacgtaccatcgcttaacgacctctgatctgcttatatccatttggggggccttggcccccctacttgtctggagaatcctaatggcaaaagaatttagccgctctcagcgcgtttctcaggaaatgcaaaaagagatcgcaatcattctacagcgtgaaatcaaagatcctcgtgtcggtatggcgacggtgtcgggtatcgaactttctcgcgatctggcctacgccaaggtttttgtcactttcctgaatgtattaaccgacaatgccgatcctgatacggtcaaaaacggtatcaaggcactgcaagacgcttccggttatatccgtactttgctgggtaaagccatgcgtttgcgcattgtgcccgagctgacatttgcctatgacaactccctgattgaagggatgcgtatgtctaacctggtcacaaacgtcatcaaaaatgacgttgagcgtcagacctctacaggcactgacgaggagaagtaatgggtcgaccacgtcgtcgtggccgtgacattaacggtgttctgttattggacaaaccgttaggcctctcatcaaatgacgttttgcagaaagtgaagcgtcttttcagtgctaaccgtgcaggtcataccggtgcattggacccattagctaccggtatgctgcctatctgtctgggcgaagcgaccaagttttctcaattcctgctggattctgataaacgctaccgcgtgattgcccgtctgggccaacgtaccgatacctctgatgcagagggtgcgttgattagcgagcgtgacgtcaatttcactcaggaacagctggacgccgcgttggatagtttccgcggtgacacccagcaagtgccttccatgtattctgcgctgaaacatcagggcaaaccgctgtacgagtatgctcgtcagggaatcgaagtggagcgagaagcccgtgatatcacggtctatgagctgcaattcattcgttgggaaggttatgagctggagctggaaattcattgctcaaaaggtacctacattcgcaccatcattgatgatttgggcgaaatgttaggctgcggtgcccatgtcagctatctgcgtcgtttgcaggttgcaacttatccgagcgatcggatggtgacactggagcaactaagcgccatggttgaaacggctcaggccgaagagcgttcacctaacccggaactggataaactgttgctcccaatggatagcgcagtgttgaatttcccggaagtgaatttgctgccaatcgttgcagcttatgtgaaacagggtcaaccggttcaggtggcgggtgcgccaactgaaggcatggtccgcatgaccgaaggcgaagagcgcaatttcatcggcatcggtattattgctgatgatggcagagtcgcaccgaaacgtttggttgtggaacacgtagaataggcgcaatcggcctatcttgcgatcccacacatcaaagagtagaatagtccggcttacatattgggttgctgaattagagatcggcgcctgtctaatttaatctattatttggagttgtattatgtctctaagtgttgaagcgaaagctaaaattgttgctgacttcggtcgtggtgctaacgacaccggttctagcgaagttcaggttgctctgttgactgcacaaattaaccatttgcaaagtcacttctccgagcacaaaaaagatcaccacagccgtcgtggtctgctgcgtatggtatccacgcgtcgtaagctgctggactacctgaagcgtgaagatgtagcgcgttatgcttccctgatcgagcgtctgggtctgcgtcgctaagtctgcgagtttcgagtagaaaggggcctaatttggcccctttcttctaagaaccgatgacagaaaacgttaacgtattgttattgtttctaaaataggatcttccgttacagcatttcgcgcggctaatgagagactttagctcaatggtgagttaagggttgtcattagtcgcgaggatgtagtgtgaagatcggtaagtaacaggtggatcaggtcgtcaatacgatcgagcgccgatcaagctaaaggatattattttgctgactccgattattcgtaagttccagtacggtcaacataccgtgaccattgaaaccggtatgatggctcgccaggcaactgctgccgttatggtaagcatggacgacaccgcagtattcgttactgttgttggccagaaaaaagccaagccaggccaaagcttcttcccactgaccgttaactatcaggagcgtacttacgctgctggtcgtatcccaggcagtttcttccgtcgtgaaggccgtccaagcgaaggcgaaaccctgacctctcgcctgattgaccgtccgattcgccctctgttcccagaaggctttctgaatgaagttcaggttatcgcgaccgttgtttccgttaacccacaggttaacccggacatcgttgctctgatcggtgcatctgcggctctgagcctgtcaggtattccattcaacggcccaatcggtgctgcacgcgttggttttatcaatgaccaatacgttctgaacccgacgaccgatgagctgaaagaaagtcgtctggatctggttgttgccggtacagctgccgcagtattgatggttgaatccgaagcagacatcctgagcgaagatcaaatgctgggcgcagtggtattcggtcacgaacaacaacaggttgtgattgaaaacatcaacgcactggttgctgaagcgggcaaacctaagtgggattggcagccagaagcggttaacgaagcgctgtatgcgcgcgttgctgaattggccagcgcacgtctgggcgatgcataccgtattaccgagaaacaagagcgttacactcaggttgatgcaatcaaagctgaagtgaccgaatctctgctggcggcagacgagactctggatgcttcagaaattcaggacatcctgggcagcgtagagaaagacgtggttcgtagccgtgttctgcgtggcgagccgcgtatcgatggccgcgaaaaagacatgatccgtggtctggacgttcgtactggcgtattgccacgtactcacggttcagcactgttcacccgtggcgaaactcaggcgctggtaaccgcgactctgggtaccgcacgtgacgcgcaaaatattgatgaactgatgggtgagcgtactgactcattcctgctacactataacttccctccttactctgttggtgaaacaggtatggttggttcacctaagcgtcgtgagattggccatggccgtctggcgaaacgcggtgtgttggccgttatgccaagcccgagcgaattcccctataccattcgtgtggtttctgaaatcaccgaatctaacggttcttcctcaatggcttccgtttgtggtgcttctctggccctgatggacgctggcgtgccaatcaaagccgccgttgcgggtatcgcaatgggtctggttaaagatgaagaaaactttgtggttctgtccgatatcttgggtgacgaagatcacttgggcgacatggacttcaaagtagcgggtagccgtgaaggtattaccgcgctgcaaatggatattaaaatcgaaggtattacccgcgaaatcatgcaggaagcactgagccaggccaagggtgcgcgtctgcacattctgggcgtaatggaacaggctatcagcacaccacgtggtgatatctccgagttcgctccacgtatctacaccatgaagatcaactctgacaaaatcaaagatgtgatcggtaaaggtggttctgtgattcgtgcgctgacggaagaaacaggtactaccatcgaaatcgaagatgatggcaccatcaagattgcagcaactgacggcgaaaaagcgaaacacgctattcgtcgcatcgaagaaatcactgctgaaatcgaagtgggtcgcatctacgctggtaaagtaactcgtatcgttgatttcggtgcgttcgttgctatcggtggcggtaaagaaggtttggttcatatttctcaaatcgctgacaagcgcgtagagaaagtgactgattacctgcaaatgggccaggaagtgccagttaaggtaatggaagttgaccgtcagggtcgtattcgcctgagcatcaaagaagcgactacgcctgatgcagaagctccagcgcctgaagcagcagagtaattaagtccgttttcaactccttgccaagaggcagggagttgttcttatctcgagggcaggacgctcttgtgttaaacaagcggatgaaaggacgtttatccaatgtttgtcttcgggagtaggaaatgaagcctttcttgcgctggtgttacgttgcgacagcactcatgctggcaggatgcagcaacaatgattggcgtaaggatgaggttttggctatcccgttgcagcctacgctgcagcaggaagtgattctagctcgcatggaacagatccttgcaagccgggcactaacggatgatgagcgcgcgcagcttttatatgagcgcggagtgctgtatgatagcctcgggctacgggcactagcgcgaaatgatttttcgcaagcgttagctattcgtcctgatatgccagaagtttttaactatctgggcatttatttaacgcaggcaggcaattttgatgctgcctatgaagcgtttgattctgtactagagcttgatccaacttacaattacgcgcgtttaaatcggggcatcgcactttattatggcggtcgcttcccgttagcgcaggatgatctgcaggcgttttatcaagacgatccaaatgatcccttccgttcgttatggctgtacctggtggaaaaagaaattgatcccaaggctgccgaagtagcgttgaaacaacgctatgaaaagtcgaacagagggcaatggggatggaatattgtcgaattctacttggggaatatcagcgaaaaaacgctgatggaacgcctcaaggcggatgcaacggataacacttcgctcgctgagcatctcagtgaaactgacttctatttaggtaaacattacctaagtctgggggacaaggacaccgcttcggcgctgttcaaactgacggtagctaacaacgttcataactttgttgagcaccgctatgcattgttggaattggcgcttttgggccaagaacaagacgacctatcggaatcggaccagcaatagctgacggacaactattagcctgatataccttggttttaaccaatgtttatcaccttcgcgggtgatggcctttttgttcgttttataatctaatttgagccggttcacacttttcaatgaaaatgactgaaaattttctcgacgagttatgtagactggctgccattattaatgaggcacgtgtacatgactactgagcttgaaacctcttttgctgatttggggctgtccgctcctattctttctgcccttactgatctgggctacgaaaaaccatctccaattcaattggaatgtattccacacctgctgaacggccgtgatgttctcggcatggcgcagaccggtagtggtaaaacagctgctttcgggcttccgctgttgcacaacattgacccaacgctgaaagcaccacaggtgctggtactggctccaactcgtgagctggcagttcaggttgcggaagcattatctagcttctctaaacatattagcggcgttaacgtggtggccctgtacggcggccagcgttatgacgttcaattacgcgctttgcgccaagggccacaagttgttgttggcaccccaggtcgtctgttagaccacctgaaacgcggtaccctgaacctgtccaacctgagcggtttagtgttggatgaagcagatgaaatgctgcgtatgggctttatcgaagacgtagagaccatcatggcgcagatcccggctgaacatcagaccgctctgttctctgcaactatgccagaagctattcgtcgtattacccgtcgcttcatgaaagagccacaggaagtacgcattcagtctagcaatactactcgtcctgacatcagtcagagctactggaaagtcggcggcggttaccgtaaaaacgaagcgttggtgcgtttcttggaatctgaagatttcgacgcggcaatcatcttcgtgcgtaccaaaaacgcaacgttggaagtggctgaaactctggagcgcagtggctacagcagtgcagcactgaacggcgatatgaaccagtccctgcgtgagcagactctggaacgtctgcgcgatggtcgtttggatatcctgattgcaactgacgtggctgctcgtggcctggacgttgagcgtatcagcctggttgtaaactatgatatccctatggattcagagtcttacgttcaccgtatcggccgtaccggtcgtgcaggtcgtgcgggccgtgcgttgctgttcgttgagaaccgtgaacgtcgtctgttgcagaacatcgaacgtacgatgaagctgaccattccagaagtgatgttaccaaatgcagaattactgggcgaacgtcgtctggctaaattcgcggctaaagttagccagcagctggaaagtagcgatctggacgtataccgtggtctgttgactaaactgcaaccagaagatgagttcgatatcgaaactctggccgctgcgctgctgaaaatggcacagggcgaacgtcctctgattctgccaccagagccagtacgtcgtccgcagcgtgagttcagcccgcgtgaagaccgtggcaacgatcgtggcgatcgccgtgagcgtcgtccggaaagccgtgacggtggcgagcgtcctgcgcgtcgcgaacgtcgtgacgttggcgagatggaactgtaccgcattgaagtgggccgtgatgatggtgttgaagttcgtcatatcgttggcgctattgctaacgaaggcgacatcagtagccgttatatcgggaatatcaagctgttcgcttcccactcaaccattgagctgccaaaaggcatgccgggcgatatgctgtctcatttcacccgtactcgtatcctgaacaagccgctgaacatgcagctgttgggtgatgcgcagcctcacgaacgtcgtgagcgtgctccaggtgctggcgcagagcgtcgtggcggtggtcgttcattcggcggcgaacgtcgtgaaggcggcaacggtgctccacgtcgttcattcggcggtgagcgtcgcgaaggcggcaatggcggcgaacgtcgtggcaaccgtgacgctcaacgtccagctgccgcaccacgtcgtgatgatgcagccgctccggcagcagcaccagcccgtcgtcgtttcggtgacgcataagtcataatcatctgaatgatgaaaacaaaaaccagccttagggctggttttttttatgtctgtaattaaaggattagcttaaatctgcgtggggttaagcatatcttgctgtaaaccggcgacaatttcgaaggaacgcaggcgagcctgatgatcaaaaatctgtccgttaatcatgatttcatccgcctgagtctcacgcagcaaagattgcagtccgtggcggactttactttcatcgccaattatcgataaccgtagcgcctgatccacgccaaactgttccgccggtgaacagatgctggacatatcctgcaccggaggaggaagttgccctggtgtgccacgacgtagattaacaaactgctgctgcatggaagtaaacaggaagcgagcatcctgtacgctatcggcagcgacgacgttaacgcaaacaatggcgtaaggctgcgaccattcggcagagggtttgaagttctcccgatagagtttcagtgcctgaagcagcatgtctggtgcaaagtgagaggcaaaagcgaaaggcaggcccatagcggcggccagctgagcgctgtacaagctagaaccgagtaaccatagcggaacatgcaagccttgtcccggaacggcctgcactgcttgctcgggctgtgcttcggcgaaataacgctgtaattcacgcacgtccgcagggaaattatcttcaccggacaaatggcggcgaagtgccatcatagtgcgctgatcgcttcccggtgctcggcccaaccccaaatctattcgattaggatacagagaggctagggtaccaaactgctcggcaatcactaacggagagtggtttggcagcatcacgccaccggagccaagacggatttttttggttccagaggcgatatagccaattaataccgaagtcgctgcgctggcaatgccagtcatattgtggtgttcagccagccagtagcgttgatatccccagtcttcagcgcgttgagccagatccaatgacgcatggaaagcatcgcgaggggtttttcccttggctatcggggaaagatccaaaacggaaagggggataaggcgtttatcagtcatagaatcgtccatcttaccttatgtcggttcgcttgaagggcgagcgcatgaattaacctgctgctgtgaaagctctggtaaatagcgggtgatttattaccagagctgggaatttacctttaaagcataaatgaaattgcttgcccacaaggggaaataaatgcttcgcctgattggggcctttgtctcatttttatccgaattttgttcaattaaagtgctgttgagtattttatttcggctttggctttctcgttggaataagatggtgaaagtggtagttgataatgctgaaatgctgcgttaagaagtgaacataaaatattttatgctgtttcaatggctgcgggctggttttattgtgacggtaacagcagaatgccgattaaccattaattaattatggttaatcatttttgataggcatcacaaatgttaccgtgattatcttcggtttcatctgcacttcaatgagttctttcagtctatcttattaataatcaattgattagaatgctgcgtcgataatgacagcataaagtagcagggacagcgctcagagggagatagatcttcagaataaccctcttgaggtagaattattttctattgaggccagcggaagacatggatgttaaaacaatattctctgtacgcaagcgtaatatagccaaaaaataaaaacacctgcctgtctgataacgcctattttcagggcgatgatcggataactgactctgtacattttaataacgataaaacctactaaccagagaataaaggcgagagctattatggaaacggcaagttctaataagagcatcattttaattgactctccggcggcacagcgtgcaaatatgtctgaaagccaatggcgtgaagcaattaaatttgatagtacagattttggctgggtcattatgagcatcgggatggctatcggagccgggattgtgtttttaccggttcaggtaggattgatggggctttgggtatttttgttatcatcaattattggttatcctgcgatgtatttatttcagcgtttatttattaatacgctggctgaatctccagagtgtaaagactatcccagtgtgattagcgggtatttaggaaaaaactggggaataatattaggtgcactgtattttattatgttggtgatctggatgtttgtttattccaccgccatcacgaatgatagtgcctcttatctgcaaacttttggcgtgacggaaggattattatccgataatccgttctatggtttggtgctgatttgtgtcttggtcgctatttcctcccgaggggaaaaactgctgtttaagttatccagctttatggtgataacaaaactgttagtggttgcggccttaggcgtctctatggttggcatgtggcatctttacaacgtaggcctactgccaccggtgggtttgctgatcaaaaatgccattatcactctgccattcactctgacttccattctgtttatccagacgctaagcccaatggttatttcttatcgggcaaaagaaaagtcgctggaagttgcacggcacaaagcgctcagagccatgaatatcgcattcggaattctattttgtaccgtatttttctatgcggtttcatttaccttagcaatggggcatgacgaagcggtaaaagcttacgagcaaaatatttctgctttggcaattgcagctaaatttttccctggtggctgggcaacggtcgttagcgttattttaaatatattcgccgtgatgaccgcattctttggcgtgtatttaggattccgcgaagcaactcagggcattgtgatgaatatattacgtcgcataatgcctgcggagaaaataaatcagaaatgggtgcaaaatggaattatggtctttgccgtattattggcatggggcgccattattttaaatgcgccagtattaagtttcacctctatttgtagcccgatatttggtctggttggttgtttgattcctgcctatctggtttataaagttccagcactgcataaatataaaggtgtgtctttgatgattattatcatcaccggcattttactgtgtatttcacctttcctggcgttttcataagttaacggcatctgatattacctgctgtaaaggttgaaggtattcattatgagtcactgtagtcattcagagttatgggatgaattcatccgcgcggtaaaacaggaagttcaacccgctatcggctgcaccgaacctgtttcgttggcattggccgcggctatagccgcatctcatttgtcaggagccatcgaacgtattgaagcacgtgtttcccccaatttgatgaagaacgggatgggcgttactgtgccgggaaccggcatggtcgggttaacaatagctgccgccgtgggggcgctggctggcgatgctcaggcgggtttggaagtgctgaagcacattagcgcggagaaactggcagccgcgaaagctatgctgtctcagggaagcgttcgggtcacgatgcaggaaagtaaatatatcctgttttccgaagcgacgttatatagcggtgatgaatgggtgactgccactattgccggtgggcatacgaggttggttaacattgtaagaaatggtgaagtactgtttgcattcggtgattctggccatgaaattcatgatgggaatgaacctacactgggttattgcttgaagcaggccgatgctcgttcagtttatcagttcgccacagaggttccatttgagcgtatcgcctttattctacaggcggcgcgactaaatggtgcgctgtctgatgaggggttgagcggcaattatggcctgcatattggtgcaacgctggctcgccagcggcagcgtggattactggcgcaagacttattgtcgaatattatgattcgcaccgctgccgcttcagatgcgcgcatgggcggggcaacgttgccggcgatgagtaattcaggatcgggaaatcaggggattgcggccactatgccggtcgtggtggtggcggagcatctgggagccagtgaggaacagctggcgcgggcgttgatgctatctcatctgatggcgatttatatccatagccagctcccgtcattgtcggctttgtgtgccgcaaccaccgcttctatgggggccgcggcgggaatggcatggctaattgaaccgggttatgacgctgtagctatggcgattagcagcatgatcggcgacattagcggcattatctgcgacggcgcggccaatagctgcgcgatgaaagtctcaaccagcgtaacggcagcttataaagcggtgcttatggcgttggatcacagcggcgtaaccggcaacgaaggcatagtcgcgggggatgtcgatagctccatttccaatctgtgcgctctggcttgtggcgcgatgaggcaaaccgatagccagattatcgatattatggctcataaggcatgtgtctgaaatcacgctaaattaggcaaaaaaatgggagaggcagaaatacctctccctgtttatttccaacttatcgaaccttaagaaaccagttccaaaccggctacccgacgccagtaaccattgcagtcggctttatccgtcagggtcagcggagccagacctttttcattggcacggaatttatcgatcatggtgagcgcttcggtactgtgtggcgataaacgcacgatatccaccaatccttgcatagaaattaggtcattacctaggttatagcagtaaccactttgcgtctgaatgccattgagaacaaatacttgctgattttcctgtgagagaatactgcgcccctgagggtacttgatgcagcaggtctcgcactcgtctttagctcgatcctcggaacgagcggtaaagcagcgagccgaataagctaacggcagatagccgtaagccagcacttctacttcgaatttattacggaatcccagctcatcacactgaatcagcatgttttccaaccagtctcgcgagagctctaccggcatacaccaacgcatcatgccctgacgatgtagaatacgcagggtataggcgttatagcagttgagcgcgtggcctgctacgaagggcagtcctcgctcagcggccatattcaccgtaccaaagtcattggcttctaacagaaaatcgccgttttctacataacgtttgagttcagtcagttctgaaggggcctgtagcaatgcaagggtagaaatcgctacctgctttccgctggaagcgacttgtttcgccagttccagccagtcgcctactttcatttcacgtcgtttggtacaaacgttttcaccaagataaataatatcggcactgctttcacaggctttctgatagaaagcctcaatatctgtttttggccagtaataaagcactgcgcccaatgagtatttcatgctttttccaccctactgccacttgcgatgataagcgcccagcgttgtttgggtgccttctgacatcgaacctagttgctccatccattcggtttttgctgcgaattttgccggttctttctgatagaggtcgatggcctgacgccagactttagcaacctggctgacgtaagccgggctacgttggcggccttcaattttgaccgaagcgatattggccgcgaaaagttccggcaacagctccagcgtattgaggctggtgggttcttccagcgcgtggtaacgctgcccgtcaaccaggtagcgacctttgcacaacgtggggtaaccggcgttttcatcgtcctgatagcggtcgatcagcacttcgttcaggcgggattccatgccctgcggcgtctgttgccagcgcacatagcgggccggagaacaggcaccgacggtattgggagattcaccggtaagataggaggaaaggtaacagcggccttcagccataatgcacaggctaccgaaagcaaaaacttccagcggcaccgggctggtgcgggaaagctgttttacctgatgcatagacagcactcgcggtaaaactacccttgctacatcaaagttgcgttggtaaaaacggatggcctcgtcgtttgtagccgaagcctgaaccgaaacgtggcgttccacctcgggatagcgctcggcggcatattccagcatcgccaaatctgccagtatcaacgcatctgcacccagttgagccgccatatcgacggcgcgttgccagcgggaaaaaccgtccggatgggcaaaagtgttgatggcaatgtgcagcttacgtttccggctgtgaacgtaattcaccgcctcttgcagctttttatcggtaaaattcagtccggcaaaatggcgggcgttagtatcatctttcaagccgatgtacacagcatcagcgccgttatccaccgcagcttttagcgcgggcaaattaccggcaggacaaagcagctccatagaaatttcctgaatgagtcagcggcaatacctcggcattaccagaggtagtaaataatcctcatccgtagatgatcgtggtgacatggataattttaacgaggagcaattttagttaacctgctgcagacatatcttgatttggggcagtttcttccgcattgctgatagtgttctgatatttagcaaagaaagcatcggtaatctggtgcagaatttattgatttagtccgcgtgggtcgtctatccgtgtggcaaaatagaaaccgatgaattcaaaggagtcagcctgtgttgggaaaactacgagcacaccttgtgcgccaagggcctgcgctgctgcgggccccgctgaaaattacgccttttgctgtgcagcgtcaggtactggaacaggtactaagctggcagttccgccaggcgcttgaagagggcgatctgaagtttcttgctggtcgctggctgaagattgaagtgcgggatctcgcattacaatggtttatgacagtggaaaacggtaggctggtggtgagccaacaggcggacgctgatgtcagcttcagtggtgatgccaacgatcttgtattgatcgctgcccgtaaagaagatccggacacgctgtttttccagcgtcgactgcgtattgaaggggataccgaattgggcctgtatgtaaaaaatttgatggatgccatcgagttggaatccatgccaacattgctacgagtgggtctgcaacaactggccgattttattgaagcagggcaacaagagggcgcggagcagacttcccgtgccgtggtatcgtgttgatccgtaccgagatcccagtagacgcaccggggatcgataaactgctgcgtgagtcttttcccagcgatggggaagcaaagctggtgcaacaactgcgtgaagacggtttactgacgctaggtatcgtcgcgaccgatgatgaaggtggcgtggtgggctatgcagcattcagcccggtagatattgaaggggaagatcgtcagtgggtcggtttgggtcctctggccgtgaaagaagatttacgttgtcaggggttgggcgaaaaactggtatatgaaggtttggacgcgctgaatgaattcggctattccgccgtggtggtactgggcgatccggcatactatcagcgttttggtttcaaacctgcggctgacgctcagctatattgccgttggccaggttgcgaagcggcatttcaggtttactcactggctcccgatgctttggatggagtcactggccaggtaaattacgccgaagcctttaatcagctgtaattattgctgatttttcaggtaacagtaaatctgctacacaagaaggctggtcgcgtaccagcctttctttttgcttttttgtcagctgtttcaggcgatattccagttttagcgcggtggagcgatcgcccgccacgcagtgaaaaaccaggttcaattctccttttcctcgcaaagatttagcgcctttacccgactgatgctgtgccagacggcgtgaaacatcggtagttataccggtatataaactgcctgcggcggtacgaatcagataaatagaccagatgctttccgacataacgctctctgttgaatgaggggcgggaatattatcgtcggaatcaggactgaagcacggtttttttatccggtatgaaaaaccggaggaaacaacgcggacggcaaagggcttgccgcccgtgaagctgctgcttatttggttttatctgccagagcaaagcgaggtgaaaccaggccgtagagcgtccagcccaggaaggtcacaatcgcgccccacatcatggcttcctgacctgagctatacagggcgtagaagctatacatggcaccgataaaggcaatgatattggctcgacgagccttagctgccggtacgttagcggctttttgaatgataaccaaagcagccatagacaaaatatatggaatgatgttggttacgaccgccagattgaccagcacattgaactgtttattcagcgatgggctgatagtcatcagagacaggacgctctgaataatgacgatggtcaacatgcctttgatcggcgcattggctttactcactttagagaagattttcgggaagaaaccttcgtccgcagaggatttgaatacctgtgcgatggtgaactgccagccgagtagggaacctacgcaggacataatcattagcgccataattattttacccacggcaggggtaaacatataggcaaatgccagaccgaaaggcgcagtggaattagccagatccatgtttggtacgataccggcaatcacgttggtcgaaataatgtagataaaggccgcgcctaaagtaccgcccagcacggcgataggaacattacgctcaggattttctaccgcatcggtattggcacaggcggattccagacccaggaaggcccatagagtcatggagatggatgaaccgatagcttcaaaggttgggaaaccgtgtgggttccaggaggcgacataggcatcggcgctaaaccaccaccaaccgataactgaaatacccagcacaggaatgataacgccccaaatggttacactactgatttggccggtaatgcgtgcgccgccaaagttagcgactgttgctaaccagaggacgccaatggtcgccagacagatccccagcgggctgagagtgctgcccagcaattcagtaccatagccaacggcagaaatagcgatggcgatattggcgatcagcaacgatgcaccgtaggtatagttcgccataaagttgccggatttaccaaaggcatattcggcgtagccgcccataccgccagatttacggctgaacatgccgcattgggcgaaagcataggccagcgccatggaacctacggcggtgacaagccaagatacgatagaaatggtgccgacttcggcgagtttagttggtagcataattatgccagaacccatcatgttaaccgccgtcagaatggttaactgtactacgcccatcttattattagatttactcatattattttctctttttatctttcagagactgcggagataaatatccccgcaggtttgagtgtcatttttggtgttgtataaataaaatatttattattttttcatcatgtagccgtaggcgcgattccagccgtcttcgtctacttgtaaatacacgccttgtaattctggtgcaaagccaggcaataaattgatgctttcttctaatgccaggaaataacgttgcgctgcgccaccccaaacttccccaggaacgacacacaatactcccggtgggtaaggaagcgcgccttctgcggcaatacgaccttctgctttacataatggaaccagctctacgttgccacgaacaaattcaatattggcatcttgcggattcatcataactttcgggaaatattgtttacggaacatttctttctgcaattgttttacgtcgtagctgacgtaaaggtcgtgcatttcctgacacaggcggccaatggtgtaacctttataacgggcttcattattgcgatagaccgttggtaatacgtcgcacaacaaagcatcttcttcaatgaaacgctcgaatcgggcgatttgcgcaaccagatgctgcatttttgccaggtcttctgcaggtgttaataagaacagaattgaattgaggtcacatttttctggcacaatgccattttcccgcaggaaattagccaaaatagtagctggaatacctgattgagtatattcaccagtattggtatcaattcctggcgtggttaataatagcttgcaagggtcaacaaaatattgggaagcttcatacccttcgaaagcatgccatttctcaccgggaataaagttaaagaaacgcaagtcttgcgccatggtttcagtgtcatattcttgccacggttttccgtctacgctaaccggaacgaaaggcttaatcatagaacaggtatttaacagcattttacgggcttcaatcccgtttttaacacattccaaccacatacggcggccgctttccccttcatgcattttcgcattgacatccagagcggcgaataatggatagaatgggctggtggatgcatgaagcataaaggcgttattaaagcgtttatgattacagtaacgatcctgacctttaatatgtttatcttttttatgaatttgcgacgtttgagagaagccagcctgttgtttatgtactgactgggtcacaataatacccggatcgttttcgttcagctccagtaataatggtgaacaatccttcatcattggaataaattgttcgtagccaacccaggcggagtcgaacagaatgtaatcgcataaatgaccaattttatcgacaacctgacgagcgttataaatggtgccgtcgtaagttcccaattgaataattgccaatcggaaaggacgaggtgcatcagcacggtcaggcgatacgctacgtatttgttcacgcaggtatttttcttcaaaacagtgggcatcgataccgccgataaagccaaacgggttacgagccgtttccagataaactggcgttgcgccagcttgaattaaggcaccgtgatggttagatttatggttattacggtcaaacagaaccagatcgccacgggccagaatcgcattggttgcgactttattagaggctgaagtcccgttaagaacgaaataggttttatcggcattaaatacttttgccgcgtgtttctgtgcatcgcaaggcgcgccttcatgaatcagcaaatcacctaatttgacatcagcgttacacatatctgaacggaaaattgtttcgccataaaaatcgaagaattggcgacctaccggatgtttgcggaagaattggccgccctgatgacccggacaggcgaaagtagaattacccatttcaacgtattttgttagtgtgttgaaaaatggtggtaatagctcattttcgtatttttcggcagcagattctaattgtttaccgtagaatccggtgttgtcaccgcacaattcaaatacgccattgagggaaggcaatacatcattatttagctcttcttcgcagcatacggcagcgaaaataggaatgttaaaccctaatttatgaatggaatcaataacgccattatttatatcttgaactgataaaaccaccgctgaaacatcggtaaaatcagtatgtaaaacatcaacaatttcccgctgggtttcaaaacaagagattgctgaagcacttgccgcaatatttaattttttcatttttgctctcttttatttagggtgtatcaacccgtccaacttgtaggtgcgttggatttcgtttcattaatttttttgtatagcaatccacatcaatgacgttgagacattaattatttgaaatgctaattttcgcctgcactgtttctcacctaaaaaataggcaaagaatttcttaagccattaaattacggcaaaagttcacatcacgaattaattggataagttaacgaacgatttattccgacagatgaaaaatgtaaatctgtaggttaagtaaatcgataattaagcatcatttttgaaacagacaatagttaaccgacgccaaatgcattcgcaattttcgcacaagctaaatattgtgtttatgacaatgacgatccaataagtacggatgtcatcgcaggagggatattatctgtaatggaaataagagaagttaaaatagctacgatgagccggcatcataagatgagttgtccgccttatatgcgccatcttcttgttgttattttccattttcgtaacgtctctttgtttttgaacaatgggttgatgcgggctattctagcgataacactcattcattccgtgatgtgcgtcacattttgttcggattttaaaatgtgttttgactaaatcatgaatatatttacttctttattcatctatttcggtttttatgcgtttttatgattattttcacgagagcgcagtaagttatatttaacatacctgacacatagaaatatcctaataggtttattaatagaattgagagcgcactcacccgtaaattgttttctatttgttaattctgattaattaaatcttaatcgagatttatcccgtttttatgcatataaatgcaaaatgggtttatataagaaatgatagctaaatcactattagatacaatttagttatgtctttctgctatttcatccaccggataacagaacaattagtcctgcctgaagggaaatcttgtctggctcatttcgcgttttgtgatcgggttcggttacactgcaatgataatacagaggagctcgcagtgaataatccagatgatttacaggtgattagccagtttttactgaagcagcatgtgttgacgctgtgcgcaagccacgcgggcgatatgtggtgtgccaactgtttttatgtttttgaaccgcagcaaatggcgttatttctaatgacggaaggccatactcgccacggtgaactgatgcagaaaaaccctcaggtggtcggcactattgctacgcagcctcgcagtgtagccttgattaagggagtgcagtaccgaggagagattagtttgctaagcggtgatgacgataagttggcgcgtcagcgttactgtcggcgctttcctatcgcaaaagtagcctctgcgccgatctggcggctaagtttgcaagatatcaaaatgacgaataataccttgggatttggcaaaaagttgtactgggtacgcgactccgcgtgaaccaccaaacatcttgctggcttatgccatagtgccatttatttcattcgcgtattgtcttcacgggagcgttgtctccatccaaatattatctttatccgaatcgtgttttcatttgggtattgtggtggaaaagtatccccgttgttctggcacgatgttttccctgcgcggtttcttcgatccggctattcttatcttattcatggggttaaggagatttaatcgtgaaggttttattattgggcgcgagcggtctggtcggtggggaactattaagattattgcggctagatgccagaattagccacatcattgctcctacgcgtaagcctttgtcggtaatgaataaattgactaatccacaggctgacgatatgagtactttgctgaaaaccttaagcgctccggtagatgcagttttttgctgtctgggtactacccgtaagcaggcggggactcaggcggcgtttcgcgcaatagattatcgtttagtggtagaaacgggggaaaccggcctgcgactgggtgcgcgccatttgttggtggtaagcgccatgggggccaatccgcattcctggctgctttacagcagaaccaaaggtgaagcggaacgagcgttgagtcagcaaggctggccgcaactcagcatattccggccttctatgctgaccggtaaacgcccggtaccgcgtctgaccgaacgtttgaccgcgccgctgtttgcagtgctaccgaagaaatggcgttcaatttccgcaaaaaatgtggcgcaggcgatgttgcagcaggcttttacggttgctcacagcggcaccgtgattatcgaatcggatgccatgcagccggcgggaaaaatttcggataaccgatctgcttcctagagtatgatcacctgattatcgtaggctgcggcaacgccggcgggcagcaagttattcatcagccagcaatccaactggtggctgacatgggtgagcagggtgtttaccgggagtaattgccggtggatctccaaggccatgctcacatcattatggttgcgtggagcattggtttgcggcggatgactgcaatccatcaccagaagatctaacggcagccgagccagaaaagcggtggtagactctggcagaccggcggtatcggtcagataggccagcgttcggcgcggactttggtagagataaccaaaggttggttttgagtggttgagcggcaggggcgttatctgtaaaccggcgatgtccagcggttgaaaaggagttaacggcggttggaaatccagtattccagagtgtttgaacaggtcgtcgcagccgtcggcatccggcgggccgtagacgggaattgggctggaatagccccaacgtaacggaaataacccctgaacgtgatccatgtgataatgtgtaagccaaaaacgctgaatttcgtccgcagaaaaacgctctcctaacgtcggtaaaccggcatcaataaaatgcgattctccctgataacgcagcatggcgctgcatggaccacgccgaaatctgggctgctgacaggcgcgctggcaggctgggcaatcgcagccgaatgccggaacctgctgtgctccgccggttcccagaagggttagctgcattttattttccactcataagctcctgcgaatgcgtatttaccaccagttgaatcagatttttcagccggtgtaaggtatcggttagcgaaccatcattatctagccgtacacaatgggcgggtaaacgttgctgataatgcgcagctcttgccagacgttgagcgatttgagcctcatcttcgcgcccacgctgtagtaaacgctgccgcagaattgccggagacaccgccaggcagaccggcagcagtcggtgcccatagcgtcgctgagcgtgggaaagatgcgcccttgagccattggctaccacatccagccctttttccagccacaggtctatttccgcgcctaaggcataatgatgctgatgtgcctgccagcttaaagcaaacagcccctgcgcctggcgctgcaagaattcctcctcgctcagtgcaatatgattttcagcaccggcatctgctgggcgagtgatatagcggtgcgctaccagaattttatgttgctggtctttgcgtagcgcggaaagcaggcaatccttgccagcgccggatggccccatcagatagattaagtgcgccatcagaacacccgaatgccttgacgccagacgttttgcacgtagacgtgttcgccctgatttctcgccaaaaccagatccgctcgcttaccttcttcaatgacgccgcgatcggttaatcctaatgcgcgagccggattgcaggtcaccaacgctaccgcctgtggcagagagaaatcgttgcttgcatcctgagcaatacggaaagcggcatccagcaaactggccggatagtaatcggaagagagtatatccaacacgcctaatgaggccagcttatgggcggcaacattgccggaatgcgagccgccgcgcacgatattgggcgcgcccatcagaacttgcataccgtgctgatgagaggctcgcgccgccgcttccgttgtgggaaattcggcaataacgctgcctagcgcctgagattcagcaacgtgctcggcggtggcatcatcgtggctggcgagagaaatattgcgctggcggcaatgggctgcaatggcactgcggtttggcgccgcccagcgagcagatagattgatttgttcttcttcaaactgcgccattttttcatcattaagatgatatttgccctgatagtattcccgatatttttcacgggaggcgaattgacgctgacccggcgaatgatccatcagggaaactaaagatagctcgggttgatccatcagtttttcaaataatggcagcgtggtgtggtgaggcaattcacagcgtaaatgaatgcgatgttctgcccgatttaaaccagcacgctgactattcaccaccgcattaatcattttctgtaaattctccagccgatgaccgccgtcgcgcacatcgcccacggccaccgcatccagcaccgtggtcataccgctggcaaccatgagcgcatcgtggctgctcatggcagaatgtgcgggccagtctacgttggggcgcggggtgaagaatttgtccagattatcggtatgtagctcgatcaacccaggtaatagccagccattgtcaccgtcaatggcttgaggcagttggctggggcgatcggtaaaactgcgaatcattccgtcctggatctccagcgatccggctatcgtgcgatcttgcagaaccagtttcacattattgaggatcatgctgggatctcctgaagggtgtcgaactggggcggcgtcatgatctgcaagcgatcgctgacgtgctggcgtacggcctcatcatggaaaataccaacgatagccgcgcctcgctgtttggcttcatcgatcaggctgaccaccgcagcgctgttgacgttatccagtgaagccgttggttcatccagcagcaaaatggggtaatcgacgataaaaccgcgggcaatattcacacgctgttgttcaccgccggaaaaggtcgaaggagccagatgccacagacgttccggcacatttaagcgagtaagtaatgatgccgcccgttcctgacaaatgtggcgttcaacgcctaattccagcagcggctgcatcacgacattcagcgcactgatacgcggaatcacacgtaaaaactggctgacccagcccagggtgtgacggcgaaccgctaaaatctgacgggcttcggcatgcaccatatcgatccattcgccctggtgttttatccaaatatggccgctgtctggcaaatagttggcgtaaagagagcgaagcaacgttgattttccgctgcctgaatggccgtgcagtacgacgcattcaccgctgtttaccgccagttctgcccgatggagtaccggtaagcgaatgccctgttgctgatgtaatacaaaggttttactgaggttttcaacccgtaattgctgattcattttctattcccgcaaaggccgaagggtgtcgcgtcaaggtgtgcatcagttttgcagcaccgatgacactaacagttgggtataggcgtgatgcgggtcgtccagcacccgatcggttaagccactctcaatgactttcccttctttcatcaccagcagacgatgtgccagcaggcgcgcgacgcccaaatcatgggtcacaataaccaccgccaactgcatttccacgaccagactgcgcagtaaatccagcaatcgcgcctgaactgaaacgtccaacccgccagtcggttcatccataaacaccaattttggatgagtcactaaatttcgggcgatttgcagccgttgttgcatgccaccggaaaacgtcgtcggtagatcgtcgaggcgagaaatcggaatttcgacgtcttccagccagcgtccggcctgttggcgaatctcgccgtaatgacgctggccaatagccattaaacgctcgccaatgttgccgcccgcggatacctgcgggcgcagaccgtcgagaggatgctggtgaaccacgccccaatcggtacgtaacaggcggcgacgctggctttctgccatcgcgtacagatcttgttcttgctgcccgtcgggtcgataaatgatttgtccctgttggggagccagtcgcgcggaaatggattttagcagcgtggttttccccgatccggattcaccgacaatccccagaacctcaccgggatagagctgaaaagacacatcgctaaaacctttgcccggcgcatataaatgggtcagattttccactgaaagtaacggagtcgcggccagttgtgcaggtttcatcaggcattcacctcggattggctggccgcagcggtatcgctaagctgttgttggcaataatcggtatcggaacatacaaacatacgattgccgagatcatccaacaccacttcatccagataactgtggtgagagccgcatagggcacagggttcgtcccattgctgaacggtaaagggatgatcgtcaaaatcgaggctttccactttggtaaacggcggaagggcataaatacgcttttccctgcctgcgccaaatagctgtaatgctggcatcatatgcatcttcggattatcaaatttgggaataggagatgggtccataacgtagcgatcgttcaccttcaccggataggcgtaggtagtggcaatatggccgtaacgggcgatatcttcatacaatttcacctgcatcacgccgtattcttccagcgcatgcattttgcgggtttcggtttcccgcggctcgataaagcgcagtggttcaggaatgggaacctgaaagatcagaatttgatcctccgccagcaaggtttccggaatgcggtggcgagtctggatcaaagtggcatcggtagttttttccgtggtggctacgccgctgacccgctggaagaagtggcggatagaaaccgcgtttgtggtgtcatcggctccctgatcgatcactttcaggacgtcgcagcggccaatcacgctggcggtgagctgaataccgccggtgccccagccataaggcatcggcatttctctgccgccgaacggcacttgataaccgggaatggctacggctttcagaatggctctgcgaatcatgcgcttggtttgttcgtccagataacccagattgtaaccggtgagaacctcagtcatggtgcggctcctgatgttcggcccgatactcgctgcgcaggcgtttcagcagttcaagttcggcctgaaaatcaacgtaatgaggtaatttaagatgggaaacaaagccagcggcttcgacgttatcagcgtgagacagtacaaattcttcgtcctgcgccgggctggcgatgctttccccgtattgctgggtttgcagggcgcgatccaccaaggccatcgacatggctttccgctccgctcgaccaaacaccaggccgtaaccgcgggtaaaatgcggtggacgatcttcgggatcgacaaacccgttaaccatttcgcactcggtcagcaggatttcgccaatatcaatggtaaaccccagctcctctggcgcgatcgacaccgtcaaataaccgctgcggatctcgccggcaaagggatgcgtacggccatagccgcgctgggtggaatagctcagcgccagcaaaaaaccttcgtcgccgcgtaccaattgctgcaaacgcgcagagcgattgcaagggaaaaccggcggattgcgggtgatatcgtcgggctgttgcccgtcgtcttgttccattaatgcaagctgttcctgtactaataaatcaaacacatgggcgcagttctccggtagcgcttctccacctttgggcgcagcaggcacatcgcctgaggccagcagggcgaaatccagcaggcgatgggtgtaatcgtaagtcgggccaagaacttgtccgccgggcagatctttgtaaattgccgagattcgccgctccagacgcatattggcagtattcagcggctggctgacggcaaggcgaggcaacgtcgtacggtaggcgcgcagcaggaagatcgcttccaccagatcgcctccggcctgtttgatcgccagcgcggccagttcaggatcgtaaattccgccttctgtcattacccgatccaccgccagacccagttgttgctcgatctgctcgcagtcgatcgccgggatttttggatcaccgcgtcgctggtgagccaagagttgatgggcggcctcgatggctttttcgcccccttttacggctacgtacatcagcgcacctctacttgggttgttcggggaatggccatcagatcttctccacaggccaataggacatccattccggtggggaaagtatttggccgattaatcagatagttcagtatcgccgcaggtaggtgaggagcgatttgacgctgttcttcaatgccgggcccacgcaggtgtaatggcgtgccttgttgcaggttatcgacctgaataatcagcgtaacggaaagctccggcgacacttcatcgcccgtcgggcagatctccaactgctcagcggctatgtggtgacgaaataccgcgaaaaccgcctgctgagtggcgatagcttccggcgcgccggtatgaaaacgtaggttttgccgaatcaaatcgttatttaaatcgccatccagataaacggcggtttcctgatctgccagcgtcagcaacacgctggttgccgctgggttaagttctttccagccctgacgatgcggcagagtgacctgtatacccggttcgctgagcgctttgaggatttggcgaaaggcgcgttgggaatcgtcaatgggttgatcaaaatgattaagcagtgtcatcagtcttctcctcgcactaaagtgaagaagtccacccggctggtggcaatggcgcgagcccgctgctggtggcgctcttgctgcaatgctgccagtggggtaatcaccgttttttgcagcaattcgtgcagcgcagtttgctgtagcagggcatccaacagcgcgcagcgttcggcatggggtttattgcgtccggcaatgtagctataaccataaatttcatcgttttcttccagcctgactaccgcgcgagtgatggtcatgtctccgagaataaagcgtttcccggtagcgcccattctggcctgtagctggtttaggccgatttctggcgcgcggataacctgatagcgcgggctgagattcagcgtctgccagtgagcgagcagatcttccggttggctgtgagccaatactgacatccagccctgccgggtagagttactttccatttaatgctccatggtcagttcgatcatgtcggcacgggtcaggctgacggagtactccgcaaccttattgctaccggcatgaatattcagagtacgcacacacagcagaggcgcgtgggtggctatttccagcagacggctttctttcgcctgcgcgcgacgagcgctgatacgggtctgacttcggttgagggattggcccaattgctggctaatgaactgatgcaaagagccggaggaaaactgctgtagcactggccaccaggtgagatcgggcagatagtgatcgattacgcacaccggcacgccgttaacccgacgcaaagtgcgtaggtgaatcacatgttccccttcgagcagcgacagcgctttggcgatgtgatcggtgcaaggacgtagcaccgccagcaaccgctcgctggtgggatcgctgccctgttgtagcaggttttggctgaatctggcctgagcgtgcagcgggtaatcgtaagggcgcatgagcaccaaaatgccaataccctgacggcgctgtagccagccgcgctgcaccagctcatctaccgcccgacgcagagtatggcggttaacctgatagcgatccgctaactgttgctcagagggcagataatcgccgcagcgatagttaccgcgcagttcttgctccaactgggcggcaatttgctgatagcgggtgggaaaactggtcggttgtctagataactgcatggcgggtataacctccatcaatgtaataagcccaatcccctttgctgaacaatgtagtggaagatgggtaagcgaaatcatgggttggcttcatggaatttactcatcaacgatctgccaactatgctggcaagctttaatgacagttcggttatgctcagatggcataacgatgaatctttttagttacgggaagaaggaaggagacaaaagaggaagtttgtcaacgctgagaggaagatgagtgatttcatacgcatactttttctgtatgaaaaaacatcaaatagattaaaaataaacactctgttaactggaatgaaatataagtgcctcttacaattaattagcgccgccttggcgttatcaacgtagggggttgcattatgtgccctaaaaatctcggccgtttgagcaaaataagcctggcgatcctcctggcttgctcattggcggcatgtagtgggagcggtggtggctccagcaacaccgcgaaaggtagtagtggtcagacaacgggtagtaccgccagcggaacgggtgacggcacgacggcaaacagcggtagcggttctgggtcaggctccggcgctggcggcagtggaacaggtactggtactggtactggtggtggggctggcagtggctcaggtggaacgggttccggcggtggaaccggaacaggcacttctacgcctcctttagtcgtcggaagcgtattaggcggcgtcggtggtgcggtcagtggcgtgggttccgaagtaaaagatgtggttagccagactccggttggcagcattcctattgctggtagcggcgtggtcacagtggtggatagcgcaggtaatgcggttaccgatatcggaagtggtatccagaacggcgttggacaattaggtaataatcctaatgcattaggtgtgacggctgcgggtgtaccgaaagccgtggcggatgtcggcaccggggtttccggcttgggtagtaccgtcagcggggtgggtaataatacgccgctgggtggcgtaactaacactgcgggtggtctggttgcaggggccggtggtgcagtcaccagcattggcaatggtttatcgcaggatttgcaaaccggcgcgacttctaaagtcaccacggcggcaacgggtctggttacgccagtggttgcagatacccaaggcataacacaaagcgtgggtggtgcaacggggctgggtgcacctgtcggtggtttactgaatagtgtaggtaacactgtgtcggcaacggggactcaagttggagcagcatcaccaacgctggctggcgtaggtcaaacgctacaaagtaccggccaggccgttgccagttctggtggggtggtgacacccaccacgacgaccggcggtggattgttaggaggcgtgaccgccggagctacggtgagcggtagcgccaatactaacgtattagctccggtaactaataccctaggtggcctgaccgcaggcgcgggtgttaccagcggtacggcaactaacggcggattactcggcggcgtcactaatacgctaacgggtaacgcaggggcaagcactaacaccgccacaaacggtgggttattaggaacaacaatacttaataaataacagaacctattacgctcccctgaagcattggggagcgcttcttttgctccataataaatttatgcgcaaatgcaaataaggaaatggacgatgaagaacagaatttggctgttttttttattcattgccgtggcagaaaataccttagcaaataccgtcccgatgttaatcgatcaaaataacccttcaagactcgcgcgtgaaatacctaaaccccaaccggccagaccgcagcctcccgcgttaaacacgccagccccttctcatgcgttaacgctagatacactcatagacgttcgccatttggattttattggcggcactcgctacgatgctaaaacattgctggccccttttgctccttatattgggaagaaggtgccgctaaagaatttgatggttgctactcaggctattaccaaattatatcaacaggatggttatgtattatcctacgcctatttaccggcagataattttaataacggtacattaaaaataggattggttgagggatatattggcaatacgctaattaaaagtgataacgccgcattggggcgttggctaaccaaattatccaagcgcattatggctgataagcctctcaccaaagaggttttcgaacgctataccattttaatgagcagaacgccggacgcgaaggttaccgccacggcgaaaaatcctaacaatatctacggcgctacggttttggaagttaaggccgatcatccgcgtagctggaatgtcagcaccgcgctggatagtcgtaaaggcgtatataccggtgtactcaatgccacttttagcggttttaccggttatggcgaacagttgggcgtcgcgacactattgcctatcaataataaagataacgatcgttatctagggctgaactaccaacaatatttgggtgataacggcctgctgatgcagttgaaaggcagttactataaacagaatcctaaagactacaccgatgttctgactttgcagccggacaatattaccctgtcagcgcgcgcggagcagacccaatataacggcggggtagttttcagttatccactgtatctaacgcagaagaaacaatggacggttagcggcggtctggattatgtggataaaagctacgatctgaaatcccgcgcccgattcaataacttcaataatcaattacgggatttgccggatcaaaatcagagtatgcattacccggcggcagaagtggcgttgttgggctatcgggaatatacccaggcttattggagtacccgctttagcgttcgacaagggattaacggcgcgctggcaagcagctctacgccttggggggatttaggattcactcgctggaaagtgaatggagataccgcctatttgttcgcggagaaatggcgtttaagcgcgtcggcagaaggggattggtcggataatgtgttaccggaagcggaacaggcaacttttggcgggctgcgttatggccgcggttatcctgatagtgaggccaccggtgactatggctacggcgggcaggtggaaatgcgctatatccataatcgggaggggcaatggctgaaaaccattcagccttatatgctggtggatacggccagaaccttcttcaatacgccgcagctaccggcgaagaaattggcgtcttatgccgtgggcgtcacttttggcgataacaaacattattctttctcactggaaggcgcgcggccaatcggcgatgtcccaagcgatagtactcgccgtgactggcgttttaacgccaccttcacctataactttgctaactgatttttacattatgatggtgtgaggaatgcttccgcgtagtgtcagcggaggcacagttttatcgaggtttaacgcagtttatgcacgatttgattactgctgccacgccaaattagcgagggatctttgagaccctgcacaaatttcccgtcgatcaatacatttatcaaatccaccacttcgcgctgttcattgcttaactcagccaattcgtagccagtccataaccagatatctttattatcgcattcggcatgcacacgcttaaccagtgacaaaatagcggagagattttctggatgcagcggatcgcctccggacagggataacccttggcggcggatgcgggtgtcattcagatccgcaatgatctggtcttccatctgtattgtgaatggcttgccggaattgagccgccaggtgctcttgttatagcagccggggcattggtgtacacagccggaaacaaacagcgtacagcgggttccggggccattaatcacatcgacaggatagtattgatgataattgatgatctttgtccgacgttagttggttagattttcagggcgacctattggccgcccgaatactcttaaatactgactggattaacccaactggccattggccagatgtttaacccggcgcttcacttcttcctgcttcccggcgttgaacggacgcgcatccggacttcccaaatagccacacacccggcgcgtcaccgagactttggacggctcgtgattaccgcatttcgggcaggtaaaacctttgctggtgcaggaaaactcaccggtaaaaccgcattcgtagcattcatcaataggtgtgttggtgccgtaataaggcacgcggtgatagctgtaatcccatacgtcttctagcgctttcaggttgtgctgtaggtttggatattcgccgtagcaaataaaaccgccgttcgccaacggtggataaggggcttcaaaatccagtttatcgtaaggattaaccttcttttccacgtccagatggaagctgttggtgtaataacctttgtcagtaacgcctggaacaatgccgaattcggcagtatccaaacggcagaagcggtcacacaggttttcactcggcgtactgtaaaggctaaaggcgtagccggtttcatctttccagctatcggttgcatctttcagatgggaaacgatggcgatagctttgtcacgcagttgctgatcgtcaaagacgtgggtttgattgccaaatagcgcgttaaccgtttcgtgaatacctatatagcccaaagaaatggaagctcggccatttttaaatatttctgcaatattatcatcggcttgtagtctaacgccgcaggctccttccatatataaaataggcgcaacccgagctttgataccttccagacgagcaatacgtgtcatcagggcttttttcgccagcgacagacgctcatccagtaactgccagaagcgagcttcatcgcctcgggattccagcgcgatacgcggcaggttcaggctgataacgcccaaattgttgcggccatcgtggatttctttgccattctcttcataaacgccgaggaagctgcggcaacccattggcgtcttaaatgaacctgtaactttaactacctgatcgtaattaagaatgtctgggtacatacgtttggtcgcgcattccaaagccagttgtttaatatcgtaatttggatcgccaaacttatagttcaggccgtcgcggatggcaaacaccagtttagggaacacggcggttttccggtttttacccaagccggcaatgcgattacgcaagattgcctgctggatcattcgggattcccaactggttcccagaccaaaaccgaaggtcacaaacggggtttgtccgttggcggtatgcagagtattcacttcgtattccagtgattggaaagcgtcgtgacactctttttcggtacgcgccatggcgtagcctttcgcatctggaattgcccattcttcggctatacgctggtgtttgttgtaactggcggtcacaaagggagccagaatttcatcaattcggttgatggttgtaccgccataaatatggctggcaacctgagcgatgatttgggcggtcaccgccgtcgcggtagaaattgattttggtggctcgatttcagcgttacccattttaaagccttgggtcagcatgccgtccaaatcgatcaacatacagttgaacattgggaagaaaggcgagtaatccagatcgtgataatgaatttcgccgcgttcgtgagccagcaccacatctcgcggtaaaatatgctgtttagcgtagtgtttcgccacaataccggcgagcagatcccgctgagtcggaatcactttactgtctttattggcgttttcgttgagcagcgccatattgctttgctctactaaaccacgaatttcctgattcaggcgaccgcgtaattctcgtgacacatcgcgatcgtggcggtattcaatataggcgcgcgccagctgtttataatcaccggccatcagctgattttcgaccgcgttttgaatttcgcggatatcgacctgcgtttggttttccattttttgagcgaccacgcgggcgacggtggcacaataatccgcgtctaccacgccgacagccagagctgcacgctccacggcttctttaatgcgcacctcgtcaaaaggtacctgacaaccgtcccgcttaatcactactggtttcacgatgtgactcctgtttcccgttatgcagggttatccacaaggcaatcccacagctggaaagggctgcggaggaatgtggatgacactgtggataactactatatataggtgttttgcttttgatagacactatatatgggtttaatcggaagtgacagccaacttatttgacttaggacaaggaaatattctttaggtttattccctgtacagtcgatcacaaatttgaaatttttagtggattttttgtcgaatcgcgaaaatgctctagcagaaaatcgacccaaacccgcacacggggaggcagatttgccgaagcataatacagccatagcggaacggaggctggccagtgtttctccaataccggttgtaaacgaccagcagagaaatgggcggcagtgtgccactttgccagataggcaatacccatattcgccagagtggcatccagcatcatggcgggctgagaaacgatcaaacgtccggcgggttcaacgaatttgacgcggtgatcttgttgtaattgccattttactacgcggccggttgctggattgcgatgcaacagcgccagatgctgatataaatcttctatggtttgcggcgttccattctcggcaagataatcgggagaggcggccagcaccatttgcaccggagagaactcgcgggcaatcaagcggctgtcgggatcgttacgattaccaatggccacatcaaacccttcccccaccaggttaaccactctggcatccagcgaaatatctaaatcgatttgcggataacgggctaaaaaagtcggaatcagcggcataagcagctggtgggcaaatccggggatcacgctaatacgtacggtgccgctgggctgctgttcctgactttggacactttccagcgcggtggataatgcttgccacagtggcgctacgcgggcgagcatcgcttcgccttcatcggttagtactacgttatgggtattgcgttgaaacagcctgacgccaagttttgcttccagtacgcgaacgtttttactgatagccgcaggcgtgacccctagcttgcgggctgcggcggagaaattatcgctttgagcggcgctgagaaaggcggggagtaaacgatggagatccgaaggcagcgacataatggttgatacctttagtttaaattgatgttgccgattacagactacaccaacatggggagaaatgaaaaaatgacgtaataaaaccgcagaaggaatcattatgtctcgtattttagtattagcggcacaccgtaatccggatgagtctcgtatcaaccgtcagttgattgacgctttgcgtccgctgccgaatgtcaccgttcacgagctgattcgtgcttatccagattttaagattgatgtcgctcgtgagcaggcgttattggatgcgcacgatgttgtggtgatgatgtttccattttactggtacagctcgccggcgattttaagcgaatggcaggatgcggtattaacttacggtttcgcctatggcagtgagggcacgcggctgcaaggtaaaccgctgaaattggtggtttcgaccggtagccgagctcaggattatagcgctaatggatacaatcgctatccgattgaaaacctattgttacctttccacgctacggccaatctgaccgggatggatttcctgccaccgtttttgattcagggcacgagcaatataagtgatgaaaagttggtgatgaaaatcgaagaagcggtgaaggtcataaaggggatggagtagggttgggttgtttgtaaggaagggtttttgattgttttttaatctcagaatcagcgctgagttttccaaagtcaaaattggatcaggtttcgcaagccgaatagttcggtttctcctcactcgccgtggaggcttccgagcagggttggccgtcgccgcaaccctgcacccgcgtttggcgcgaaaacggggttctgcgaacgtcccctcgtgcactctttgtccggcgagccagtgctagattggcttgcgggcgttatcaggatgccatccctcctgtcgctgcggctcaaggtgcactttgaaccgctgacgaccgttcactcttggcctcatcccagcgcggcccacttcctgattgcgtcttagtaaaatcaaaaccattttttctgaatcacaattcgccttttgctttggatatcgcttttggtccagatcttgacttggacctttaagagcatatcttggccggcgtgatgaacgaggtgtcctgcgaagcgggtagacaatgcaggcagacaatgttgtgcggaggtgcggattgttgaggctcgcgcctatgagccttaactcggttgaggctgtggaggtgaaaaatttaccaagcgaatatcaaccgaaacccgatccgatttcagatttgaactgattttgactttaaagcacatatttcagtgaccgaagtttggaattggatcgggtttccattcagagagtaaccaataacacctcaaccaaatgaatgctccgcaagctccaaatctcggcgtgaatactctcgtacaatgtgacctttttccatcagcgcggctcgttcggacatatgcgctactacgtcgttgtcgtggctcactaacaggtaagtcatgccgtgttcccgtttcagcttattgagcagatttaaaatctccgcctgtaccgacatatccaacgcggaagtgggttcatccaatagcaacaatttaggccgtaacagtaatgcgcgggcgatggcgattctctggcgttggccgccggagaactgatgtgggtagcgatgcaccgcagaggcgggcaatcccacttgctccaacgcttcgccgatgcgttgctgaatgttcttctcgccgtgaactttcagcggctcccctaaagtacgctggatactgtgctgcgggtgcagcgaagcgtagggatcctgaaacaccatctgtacatctttacgtaactgaccggtaaaacgctggctggggcgtaacggttgaccaagcaaagaaatctcgccctgccactcgcgttgcaaacccgccaacgtacgcaaaaccgtagattttccgcagccggatgcgccgattaggctgaaagtctcgccggcttcaacctgaaaacttacggactctacggcggtttttacctgattcccctgcgggaaacggacccgtagctggctaacttcaatcagtgccattctgacctccgaacatatccgcctgacgatccaacactggtaaatcagtgccgaaagtgctggcatttgggcgacaggcccacagcgtatgagtatagggatgagtggaataaggcaaatctgccgccagaccttgatcgaccagcttgccctgatacatcaccaacacgcgatcgcaatgctcagtgaccaaaggcaaatcatggctgattagcagcaggctcatgttgcgctgctcggtttgctcgacgataagctccagaatctggttgcgtagtttggcatctagcgcagaagttggctcatcggcaatcaatactcgcggattattcactaacgcgatggcaagcattgcccgttggcccatcccaccggaaagctgagcaggatagtgatgatagtggtcttcagttaatcccaccgatgccaacgcattcagtacacgctcatgggtgtctgcgcgggtcaggctgttatgtaacagcaaggattcttcaacctgtttgccaatggttcgcaccggatttaatgcgtaacgcgggtcctgcaataccatcgcaatatcattcccgcgtagtttgctccatcgacgtggttttaacgtcagcaaattctgttggatcggattctgcgcatcctctggattttcagcgtaataacacaaccgatcggcgctcactttgcccggctggcgcactaatcccatcagagaacgcgcggtaatcgatttaccggagccggattcccctaccagcgccacgcgctcgcggccaagctggaaggagattttatccacgacccgctgctggtggaaatcaatgctgaggtttttcacctccaaacgcagatcagtcatgatgagggtccagtaagtctcgcaggccatcgcctaacaggttgaaagccatgctgctgagcaaaatcgcgcagcccggaatggcggcaatccaccattggtcgaatatcacctgcataccttcggccaccatcgaaccccattcagccatcggaggacgagcccccagacctaggaaccccaaacctgcggctgcgaggataattccggccagatccagcgccagtcgaaccaccgccgagggcaggcacataggtaaaatgtgtccccaaagcagacgtatgcccttgatacccatcatttccgctgctgccagatagtcacttttacgcagtagctgaatctctgcccgtgcctgacgagcgtaggctggccaggtcgtcagagccagtgccaatgcgccattcagcaaaccggggccaagcatggcgacaaaggcaaaggccaaaatcagacgtggcatcgacatcacgacgtcagtgatgcgcattaaaaccttctccaaccagccgccgtgataaccggaaagcacgccgactaacaatcccagcggcaaagtgatcaccgtgactaaaagcactaagcccagcgttgggcgcgtaccataaatcacgcgcgacagcatatcgcgaccgtagctgtcagtacctaaccagtggccgggttccggtggcagcaaccgttcggcggcgttttgccaattcgggttatgcggtgcaagccaaggagcaaaaatggcaatcagcactaacagggagagaataaacagcccaatgctggcggaaggagagcttttcagcgcacgaaaaaatttcattatcgacatatcagcgcgatctcggatctaacagctgaaccagcaggtccgtcagattattaatcagaataaagcacatccccagtagcagcgtgccgcccataatcgcagtggtatctccggcaaatagcgcactggtgagatagcgcccaatgcccggccaggcaaagaccgtttctgtcagcactgcgccttccagcatgccggtgtacacgagtgcgatgacggtaagcagcgtgccgcgaatattcggtaagacgtgcatcagcaggatacgtatttcgccagcgcctttggctcgcgcaagggtgacgtattctttattcagctcgctcaggcaggcagagcgcgtcagccgggtaatactggccagcgcatagtaagacaacaacgccaccggcagaaccaaatgggctgcggcattagcgaaagcgccgctgtcgccggaacgccaggtatcaatcagtgcgaaaccggttttggcttctaccgtgtattggtaaatatcatccagacgaccggggccggggctccactgtagcttggcgtaaaacagcaatagcatcagcaaccctagccaaaagattggtactgagttgcccagcagggtgaagaaacgaatgagggaatcgactttactcccggcccagcgcgcgcagattaatcccagcaatacgccgagagacgccccgataatcagtgataacgtcgctaactccagcgtagcgggaaatgcggtcagtaaatcctgcaataccggctgcccgctggaactggcaacgcccagacagccatgagccagttggaccagataatgccaaaactgcaccggcagcggttgatccagtccaagctgctgcctaacctgttgataagtcgcctgactggcatgatcgccgacgatttgcagcacgcgatccaccggcgacagcgctgacaacaggaaagtaatcagcaacaggccgaatagggtcagggcgaggctgaagatccctttgatcagcgcccaaaaacgacgccggggcaaggctcccggcgtattatttaaagctacggacatgtggctatctgctcgcttgtattaaaagttatcccaaccgggtacgcgggtacctatttgctgacaaggtcgtaataaaccatatcggcattcaacccttgttgatagcctttcacattatcccgtaacacaatttgcgttttggcctgatcgataaagatataaggcgaattttgcagaagttcctgctgtagcttggtataaagctggatgcgcttggcggggtcggcttcggcaacggcggcaagcgtttgtttattcaacccaggaattgcccaaccgtttaaaccggcgacggtgctgcttttgccatcgttataggcaaaagcgctagcgttggaatgagcgtcaaaatagtctggaatccacaggcgaatcgcagactgatgctgtttggcgcgaacccggccataaacctgactaccggcggctggcagcagtactaatttaacgccgccctgagcgaagctggcctgtaaagattgggcgatggtgataaacggcggtttattttccacatccagcgtcagagtcgcgtttttaataccggctttctgtagcaaggctttggctttggcaggatcgaaagtaaacggcgtttcttccagcgcacccggcaaaccgaccggcaggaagctttgatgcacaaaatactgtcccttcagcaaatctttggtaatgccttggtaatccaccagatagcgagctgcttgccagaattctggcttgcttaacattgggttagctggattagcggtgttaaagactagatagttttgttcggccgacgggatttcgaccactttaacgccagcctgagttttcagcgcggcggtctgatccggccccagttcccgagcgatatcggcatcgccctgttgaatcaggaggcggcgagcgcttggatcgggaacgttcttgataataatgttttttatcagcggcttattgcccggcgaggttgggttggcgtctaacacaatggcctgatgaggttggtaaacccgcattttgaacgggccgctgccggcagaatgcattttcagccaggcgttaccgaaatcaccgtctttttcatggggagccaccgccgctttatccacgatagaggcaataggcgtagacagaatattcagcgctaccgctgggctgacatcggcgctccagcttagttgtagggtattgttatcaatcttcttcaaatgcttatcgatattgtccggctcccagccgagaacgttcaggataaaggccggtgaacggttcatttttaccgcgcgagtaaaggaataaataacatcgtcggcgcgcacaggattaccggaagcaaaagttgcggcggggcgcagttttaccgtcagggttttattggcggcgtcaccttgccagctttccgccaaaacagggatcactttggccggattttcccgatcggcctgcatcaggcgctgatacaaacttgggacggtctgaatgctggataattcgttactttctgcggggtcgaggctgacaatatcatccagtgactggaccaccaccaaggtatccggcggtgtcgcggcctgaacgctggcagacaaagttgccgcaaccagcaacgacagaattcttgctttcattaaaacactccccgaatagacagatagtctcagccagacagaacgatgaggtaaataaattatttttaaattatttaatcgcatcgcacgatagaagctttgctgtctgtgggcaaagtctcaagggttatttcatataactatctagactatagacggagtttcggatctataaaccgatgtatttatcgtcggtggacgttaaataaccctgaaatcttgatgtgtgttagctttcgagaatcatgatttgattataatgaaacaatatttcactataattcgagtatctaaaaaatgattactgggaatatccatcatctcgatttactcccttattttccccaaccgttgcgtgctgccattgaatatgtaaagcagcatatcaacgcagaaactccgctgggtaagcatgatattgatggcaacaatctgtttgtactggtttccaacgactgtaccgattggcaggaaaatcgtcgggcggaatatcacgctaaatatctggatatacagattgttctggcgggtcaggaaggtatggcttttagcaacctcccagcgggagaaacggaaaccgattggctggccgataaagatattgcttttttaccggtaggaataagtgcacaaaatgaaaaaatgatcttgatgcagcccagtgattttatcgtgttctatccgggagaagtacataagccgttgtgcgcggtgggggaaaaggcacatgtaagaaaggcggtggtgaagatgaacgcaagtttgttgctttagtctggttgggtgtttgataggggcgatttatttcagtggtgaattgagccgtagccacttcaatctaattaaagcaccttctggacgggttttaataatccgccgtccttggcggattatgctgaatagcgtaaatacttaatccgcggagagtgttgctaccatcacggctttaatcgtatgtaaccggttttccgcctgatcaaacacaatactgtgtgcagattcgaacacttcttcggtcacttccatacctcctggcatagtgtattgctcggctaattgcttgcccagtgtggtttggtcatcatggaaagccggcagacagtgcaggaatttgacctgcggattgccggtcagcttaaccacgttcatattgacctgataaggcttgagcaaagcaactcgctcgttccatacctcctttggctcgcccatggagacccagacatcggtatagaggaaatcagcgcctttcacgccttcggctatatcttcagtcagagtgatttttccgccggttttctgcgcctgcgcctgacaggccgcgaccagtttagcatccggccagcaggcttttggtgccaccagccgtaaatccattccaaccaacgcagcggcttccaacatggagttgcccatattgttacgagcatcacccaaataggcgaaagtcatttcttgcagactcttttttggcaaatgttcctgcatagtcagtaaatcagccagcaattgagtcggatggaattcgtcggttaagccattccataccgggacgccggcaaactcagctagcgtctcaacgacctgctgcccgaaaccacgatactgaataccgtcatacatccggcctaacacccgagctgtatctttaattgattctttatgcccaatctggctaccgccaggcccgaggtaagtgacgcgagcaccttggtcatatgcggcaacttcgaaagagcatcgggtacgagttgagtctttttcgaagatgagcgcgatattcttacctgccagtttttgtttctctgtgcctgatttttttgcctttttcaattctgcagccaaatcaagcagtgtggtaatctcggcgggggtaaaatccagtaacctcaaaaagtgacgtttgtagaactgactcatagcgctcatctccatgcattccgaatagtctaattgaatttaaattcaacttatacgtataaatattcaattgcaactacaaaagataaatctttctcgtttatagtggaggcattggcggcggtgtgggaaaatagggctatataacgcccattgactgaggataaaggcatggcaaaccgcgaaaaactggatgagcaacgtgatgagacccgcctgatcatcgaagaattactggaagatggcagcgatcctgacgcgctgtacaccattgaacaccatctttcttctgaaaagtttgaagtgctggagaaagcggcggttgaagctttcaaactgggttacgaagtgactgatgcagaagagctggaagttgaagatggctccgttgtgatgtgctgtgatgtgatcagtgaagtggctttaaacgccgaactgattgattctcaggtagaacagttggttgcattggctgaaagctgtggcgtgaactacgacggttggggaacttattatgaagacccgaacggtgaagatgacgaagacggcgagtacgatgacgaagaactgattgatgaagatgacgacggtaaacgtcattaatctgccgctttgagttttatctaataaacccgcgctgttgatagcgcgggtttttttattctatgaataagtgacttaattacattaaatcgagagactacaacattttcaacatagtcacttcgcaatccacatgaccagtcgcacccattggcccgtcgatgtgttcgaagcctaatttttcatataaggcgacggcgctggtcaggctggcggttgtttccagataacagcggctaaaatcatgctgacgagcaaattccagcgcctgtaatgccagttgtttcgccagacctttcccacgtagaaccggcaagaaatacattttttgcaattcgcaaacatcggcttcgccacatgacaaaggcgctacgccaccgccaccggcaatacggccatcgacctcgataacccaataagcgctacgtggttggctatatagctcatgcaaatgctccagatttggatcggagacggtataacctttatccgccgtcaggccgaattcggcagaaacatcgcggataacgttggcaatggcaaggttgtcttctgccacgataggacgaaccagaagtcgcaagggagtggctgtggtcatggcatagttactcagcaaaaataggtggaaaggcgtgctctgaggacaggtgcccagcagtgtgtactgaccagcgagtctgtagtgctctgtaataccatcgaataccgcagtaatgcaactatgcccttcgtacttggcgctgcaggggtgttggctgcgtccactcacccgaatcacttactgatgtaagctcatcgggattcgttcactggccgcctacctgcaaccccaattacttgggcataaacgttatatattgggcgctgaaggggtgttggctgcgtccactcacccgaatcacttactgatgtaagctcatcgggattcgttcactggccgcctacctgcaaccccaattacttgggcataaacgttatatattgggcgctgcaggggtgttggctgcgtccactcacccgaatcacttactgatgtaagctcatcgggattcgttcactggccgcctacctgcaaccccaattacttgggtataaacgttatatattgggcgctgcaggggtgttggctgcgtccactcacccgaatcacttactgatgtaagctcatcgggattcgttcactggccgcctacctgcaaccccaattactcgggcataaacgttatatattgggcatagagatttataacgaatggcatagaagtattcgctgttttcactataaaactaaagccgcagggatgagctgcggcttcagatttttgggatataaatatcccgcagttcaagctgggtgaagctcagactactttacagcgccgcgatagtggcctgctgctcaatcagttttactttcgcttcggcacaggcagccagtctctcacgctctttagcaacaacggcttctggcgctcgtgccacaaaaccttcgttacccagtttgctttcgatacgctcgatttcaacatcaagcttggccacttcttttgccagacggtccagctctacggctttgtcgatcagaccggccattggaatcagcacttctgcgccttcaaccagcttagtcacggacaatggccctttatccccttcaggtaacagggtgatagaggaaagacgcgccaacgactggataaagctctggttttccagcactcggcgctgagcttcagcgctggcgccgcgtagcaacacttccagtggtttacccggagaaatattcatttctgcacgaatattacgcaccgcaataatggtctgcttgatccattccaaatcgctcagggctttttcatcaacctggctggcgtcatattctgggaaaggttgcagcataatggtgtctgcggtaatgcccttcagcgttttcacgcgttgccagatggtttccgtgatgtaaggaatgattggatgcgccagacgcagcagagcttccagcacgttaattagcgtgttacgcgtgccgcgcagctccgcctcagaaccgttgctcattaccggtttggtcagttccagataccagtcgcagaattggttccaggtgaattcatacagaatacccgcagccaaatcgaaacgataagtatccatcgcttcacggtaggctttcaccgtctggttgaattcagccagaatccagcggtcagccagtgacagcaccatttcgccgccgtgttggccgcaatcctgatcttcggtgttcatcaacacgaagcggctagcgttccacagcttgttacagaagttacgataaccttccagacgcttcatatcccagttaatgtcgcgaccggttgaggccagcgccgccagggtgaaacgcagggcgtcggtaccgtgcggctcaatgccgttcgggaattgtttttcggtacgcttgcggattttctcagccaactgcggctgcatcatgttaccggtgcgtttttccagtaattcttccagcgagataccgtcaaccatatccaatggatcgataacgttacctttggacttggacattttctgcccttcgtcatcgcggatcaaacctgtcatgtagacggttttgaacggtacctgcggcttgccgttttcatctttcataaagtgcatggtcagcatgatcatgcgggcaatccagaagaaaataatgtcgaagccgctgacgataacgctggtcggatggaaggttttcagcgcatcggtctgctctggccaacccagagtagagaaggtccacagaccggaggagaaccaggtatccagtacgtcttcgtcctgacgcagagcaacgtctgcacccagattgttctcgcgacgcacttccgcttcatcgcggcctacgtacactttgccagcttcgtcgtaccaggctggaatgcggtgaccccaccacagctgacgggaaatacaccagtcctgaatgtcacgcatccaagagtagtacatgttttcatactgcttaggtacgaactggatatcgccgttttcaaccgcttcaatcgcgactttcgccagcggagcagtacggacataccattggtcggtcagcattggctcgataaccacgccgccacggtcgccgtaaggaacggtcagatcgtgaggtttgatttcttccagcagacccagtttgtcgaactcggcaacgacggctttacgagcggcaaagcgctccatgccttggaacggttctggaatcgcaccgctgtatacatcggtgacttcaccgttggtgtcgaatacttcggcttcgctacggatatcaccgtcgaaagttagaatattgatcatcggcagggcgtgacgtttaccgacttcatagtcattaaagtcatgggctggggtgattttcacacagccggtgcctttttccatatcggcgtgttcatcgccgaggatcggaatgcgacgacctaccagcggcaggatcacttctttaccaatcagatccttgtagcgcggatcttctgggttaacggcgatgccggtatcaccaaacatggtttccggacgggtcgtggcaacaaccagatagtctttgccttctgcggttttcgcgccgtcggccagcgggtaacgcaggtgccacatggaacctttggattcgcggttttccacttccagatcggagatcgcggtgcgcagttttggatcccagttcaccaggcgtttaccgcggtagattagatcttctttgtgcagacggacgaacacttctttgaccgcgttggacaggccatcgtccatggtgaagcgctcgcgctcccaatccacggagttgcccaaacggcgcatctgacgagtgatggtgccgcctgattcgcctttccactgccagattttgtcgatgaaggcgtcgcgaccgtaatcgtggcgagttttgccttcttcagcagcaattttgcgttctacaaccatctgggtcgcgatacctgcgtggtcagtgccggcctgccacagggtatttttcccctgcatgcgctggtagcggatcagcgtatccataatggtttgctggaaagcatgacccatatgcaggctgccggttacgttcggcggcgggatcatgatgcagtagctttctttgctggtatcgccgttcggcttaaagtaaccctgcttttcccagtgttcgtagagcggttgctcaatctcgtgcggactgtacgtcttgtcgagggagttgtttgttttttccattttatttatttgttcagtgagttggcggcgttgccgtggtcaaatggaagccgacgctgcgatatgacttatatcggtcgcgcgccaactgtttcaaagtttcttcgtaaggaacgaagtctatcacttcatggaaagcggtggcaaaacctgcgaactccggtagcaggctaatcagcaggtcgcgcggtgaatttccacgtctctccggccaggccagctccaccggtgcgccgtactttggcccttcgcccgctaaattatgcggaacaaattgctccggcgctcgttgccacagggcctcgtcaagacgttgagcctgttcctgactttcacatgcgatcagcacccgtttgcccgcccgccagcgttcagccgccagatcgcatgccagcgcctcatgggctcgcagctcgccggaaggttgatcgtgatcgagaagatagaaggttgcgtttttcataggctctctacgacgttaagggcacgaagtgtgcccttaagataactcggtgtatacccttgtctctgaagtaacagggggattctctgttacttcaatgagttcgggtagatatcaaacgattaatcgtcgccgttcagacctgcgcgattcaacaggaactgcgacaacatggcaaccggacgaccggtagcgcctttgttttttcctgaacgccatgcggtacccgcaatatccaggtgagcccaagtatatttacgagtaaagcgcgacaggaagcagcccgcagtgatagctccgccagcgcgtccgccaatgttcgccatatcggcaaaattggagtccaactgttcgtagtactcatcgcttagcggcaagcgccacgcgcggtcaccggcttgttctgaggcgccaatcagctcgtgagctaatggattatggttcgacatcaaaccggtaatgtggtgacccaaagccaccacgcatgcgccggtcagggtggcaatatcaatcaccagctctggttcgaagcgttcaacgtaggtcagagtatcacacagtactaaacggccttccgcatcggtattcagcacttctaccgtctggccggacatagtcgttaacacgtcccccgggcgataagcctgcccgcccggcatgttttcacagcccgccagcacgccgataacgttcagtggcaattgcagctctgccactacgcgcatcacgccatacacggtggcggcgccacacatgtcgtatttcatttcgtccatgccttcggctggcttgatagaaataccaccggaatcgaaggtcagccctttgccaaccagcacaattggcttagcgtcagcattcggattacctttatattcaatcaccgacatcagggattcgttcttagaaccttgccccacggccagataggaatgcatgcccagttctttcatctgttgctcaccgataacgcgggtgatgatgttagtgctgaacgcatcggctaactgacgagcctgagaggccaggtaagcggcgttacagatatttggcggcatattacccaggtcttttgccgctttgataccggaagccacagccaaaccgtgctgaattgcgcgctctccgctggtcagttcgcggcgggttggcacgttgaataccattttacgcagcggacggcgcggctcgactttattgcttttgagctgatcgaaggtgtaaagggtttcttttgccgtttctaccgcctgacgtactttccagtaggtattacggcctttgacgtgcagttccgtcaggaagcaaacggcttccatcgaaccggtatcgttaagggtattgatggtgttttgaatcacttgcttatattggcgttcatcgagctcacgctctttaccacagccaattaacaggatccgctcggagagaatattaggcacatggtgcagcagtaatgtctgacccactttgccttcaagctcaccgcggcgcaacaaagcgctgatgtagccatcactaattttgtcgagttgttcggcgatcggggatagacggcgaggttcaaaaacgccgactacaatacaggcactgcgctgtttttccgggctgccgctctttacactgaactccatgcactctcctgaatcttaaagacaaaggcgggagctaccgctagaatgtagcgctccgcaacgatctctctccgttgtgttaacgacgtgtgttaacctgaacggcataagttgttttgttttggcgactataagcatgttcctataggacacctaaacgctagatgctgtaatactattttagctgtgaaggttgccatatgatgagaataaatggcggattagcgatgaaactatcgattttcctgcaaaaagacaagttttcacaggcgtattagcgtgatcatcattagatatctggtacgggaaacactcaaaagtcaaattgcgattctattcatcctgctactgatcttcttcagtcagaagttagtacgggtattaggtgccgcagttgacggtgagattccgacaaatttggttttatccctccttggactcggcgtgccggaaatggcgcagcttattctgccgttgagcctattcctcggcctgttgatgacctacggcaaactgtatacggacagcgaaatcaccgttatgcacgcctgtgggttaggcaaacggtctttgattgccgccgcattaatcttatcgatgctaacttgtggtctggctgcgattaacgccatttggctcgggccgtggtcgtcaaagcatcaggatgaagtcttgaatgatgctcgggcaaacccaagcctggcagcgctggttgaaggccagttccaatcctcgcaggatggtaacgcggtgctgttcgtcagcagagttagcggtaaagaattccagcgcgtgttcctcgcacagctacgcccaactggcaatcagcgtccatccgtagtggtggccgacagtggccacatgatggagcgccctgacggttcgcagatggtattgctgaataaaggtactcgctacgaaggcaccgcgctgctgcgtgatttccggattaccgactttaatgattatcaggcggtcattggccatcaaaccgctcagcagaacaataatattgcggaacagatgtcaatgagcgccctgtggcattctaccgatcctgacgcgcgcgccgagttccactggcggctaacgctgattgtttccgtggttatcatggcattgctggttgttccgctcagcgttgtcaatccacggcaggggcgtgtgctcagtatgctgccggctatgttgttgtatctgattttcttcctgctgcaaagctctctgcgctccaatgcgggtaaaggaaaactggatccgttgatttggctatgggcagtgaacttcgcttatctggcgctcgcgctgatccttaatgtgtgggatagcttgccagctcgtaaattacgagcgcgtttgagaggggctgcctgatgtttggcgtattagaccgttatatcggacgaaccatcctcaacaccatcctgatgacgctatttatgctggtgtcgctatcgggcatcatcaagtttgtcgatcagctgcgcaaagttgggcagggggagtattcggcggctgcggcggggatgtataccttgctcagcgtgcctaaagatattgaaatcttcttcccgatggcggcgttacttggcgctttgctcggtctgggaactttggctacgcgcagtgaactggtggttatgcaggcttccggtttcacccgtatgcaaattgccgctgcggtgatgaaaaccgcgattccgctggtattgctgaccatggcaatcggtgagtgggttgcgccgcagggtgagcaaatggcgcgtaactatcgggcgcagatgatgtttggcggttcattgctctcgactaaaaccgggctatgggccaaagacggttcggactttatttacattcagcgcgttgtgggcgaaaaagagctggccggtgtgaatatctatcattttgatgatgccgatcgcctgcaatccgtgcgctatgccgcaacggcgacttttgaggataaaatctggaagctgtcgcaggtggatgaatccaatctgagcgacccgaaacaaatcaccggtgctcaaacgctgacaggggaatggagaaccaacctgacgccagacaagctgggtgtggttgccatgagtccagattcgctctctattagtggattacataattacatcaagtacctgaaacagagtgggcaagaatccagccgttaccagcttaatatgtggagcaaaatttttgcgcctatatccgtagcggtaatgatgttgatggccttatcgttcatatttggcccgctacgcagcgtaccaatgggggtgcgagtggtcactggtatttgcttcggctttattttttacgtgctggatcaaatcttcgggccgcttagcctggtttacaagattcctccggtgctgggtgctttgttgccgagtatgcttttcctgctgatcagcgtttatatgctgttaaaacgtcgatagcggcgtttttttcaacacttgaactaaaggcagtgtaataacagttgcatgcggatcacaggtaagtataattcacctcgttctccgcatactacttcagtgccgaagtggcgaaatcggtagacgcagttgattcaaaatcaaccgccgcgaggcatgccggttcgattccggccttcggcaccattagtatgaaaatcaagtcaccgcaaggtggcttttttttttgcctaaaatccagttcccgcatagctttccctctcttttcagtcaacctgattcaatctacatcaagttactgatgtgggaacatttgcgagtaatcccgcttagataatgtttgtccccacacagagcccttgaaaggatactcatcatggctttgagtgatgtgaaggttcgtacggctaagcctgaagcaaaagcctataagctgactgatggcgacggcatggtattgctggttcactccaacggttcaaaatattggcggcttcgttatcgctttggcggtaaagaaaagatgctggcgctgggaaaataccctgaagtatcgctggctgatgccagggcgtggcgggatgaggcggggatgaatagcgcaaaagggtagtagcgaggtagggtgatttctaaggccgcttcttttgtcattgtcagtttttagctgttttcgagttaattaaaagagcaagaaaatttaaatttaccttaagtttaatttatttctgaagttggatggcgtgattttttgatgttccatacaggcagatatgagaaaggtttctagcgaggtttttttaatcttattcttgactattttgctattttttaaatttagaataatagcttttagattgatttattcgtcttgtagggattttcctacagcgttatgagaaaattcatatatcagatgtaggatatttcatttattattatacgccatttcatttttattggttttgatcaaataagatatatcgctattaaattaaaaacatttagcacttaagtatgacaatctttactttatggatacgaaacaccatatttaactgtgttttgcaggataaatatctatttaatttaactaaaacgatcttttaatcggaaaaatcacaatttactagataaaaagatcgtgtatagttcgttcgtgttgttcggggtgaaatttaaggaaagttgataattcagagtatttagaaaaatctgttaactatgacatatagtgtaggcataaagaaagtcataagatgggtatcttcttaattatcctctatttgtctgcctataaaaaaatattatcggttttgctattctgtctttttagaaggtttgtaccttttaataattattttgttttcttatttaatttttaatggctattcaattgcggtgttttcagctaagaatttgaatttatcgcacaatcatatctgtataaaaatattatctaatcaaaggtctttattatgtctaatttcaagagaagtgtattggctacagcatttatttcttctgcgtttatttctcaggcatttgctgccgatgaaggtaatgggcgagtccattttactggtacagtaattaatgctccttgttcgattgcgccaaattctaccgatattaatgtcgatttgggacaggtatcaaataaggtgctggaaactggcaataaacattccgagaacgttagctataacatcgatttgcaagattgcgatctgagtgagcaaacggctggttcagtaacttatccggcaatgtctaaagttagcgtgaccttcggtggggtttccgatgcctctgctgtggctttgctggctaacaccggtagcgcgactggcgcgggtatccgcctgatcgatgctaatggcgcattactaaaagttggcgataccagcgctgatatcaatctgatctccggtattaaccaaattgcttttgcagctcgtgttgaggcaactggtacagcagtgaaggccggtactattgtttctcaggctacctacgcactgaactataaataatctctttttttatcacgtcgatttaaggggaggcaactcccctttgttcatttgtgccaaaaaagaaacgctctaaatcgatataaataattatttatacgccataagacagtgatttatttatgcagagtaattctaaaagaaaagcaatgatctttcgaatgatgccaatattatcgttggcaggcataggtttattcctgcctgagtgtgctacggcggtagaatttaataccaatattattgacgctcaagaccgtaataatattgatctttctcgatttgaaattaatgactatacgccaccaggtgattatcttctggatattatggtcaatggcaggttattacctgattcatctctgattacctatttgcctattgatgaagggaggtcaagtaaggcttgtttaacgcctgaattggtcaattctttaggtcttgctccagcagtgcgtaattcaatggggttatgggataacggtcgatgcgtttctatcgatgataaacaagaaataacggaaagttacgataaagaaaaacagcatttgattatttctattccgcaagcctggctagcgtacagcgatccaaattgggttccgccatcgcaatggggtgatggcgtacccggcgctttgctggattacaacctgtttgggaactattacgcacctaattcagggaggagtacgacaaatatcagcagctacggtaccgcaggcgccaatatggggtcttggcgtattagggccgactaccaatatattaatagtgacaatgaaggtacgcattacagtaattttgactggtcgcaggtttatgcttttcgtgctatttcgtcgataggtgccaaatttgtcggtgggcagacgtacctcagctccagtatttttgattcttttcgttttttgggggcttccctcgcgactgatgagcggatgttgccacctacgctgcgtggctatgcgccacaagttatgggaattgcccgtaccaatgcgcgtgtcgttttgagccagaatggcagaaccctttatcagactaacgttgctccaggcccatttgttattcaagacattagtgaaacggtgcagggaaatattgatgtgagagtagaagaagaggatgggcataccacttcttttcaggtcagcgctgctagcgtgccatttttaactcgtaagggttcagtgcgttataagaccgctttggggcggccaatgcatggcagccataatgcgctgggcgatccgattttctttaacggggaattttcctggggagccttcgacgatatatcgctatatggtggcctgattgccacgtcgcaggattacacagcggttgcgatgggaatggggcaaaatttgcatgagtttggtgctttatccgttgatgcgactcactcacaagctcaattacctgagcaggaaaaactgagcggggaaagctatcggatcaactattccaaacgttttgatcagactaatagccaaatcacctttgccggataccgtttctccgaaaaaaactttatgagcatgaatcagtatttggatcggctgagtggcaataactatctacaaaatgacaaacagacttataccctgacggccaaccaatatctgacatggccggatgtcacgatgtatttatccgcgacgcataaaacctactggaatgatgtttccagtaataactatgggatttcgctcagcaagcttttggatattggtccgtttcagggcatttctgcggctgtttctgccaatagagtgaaatacgagaacgaaactgaaaaccagattttcttctcttttagtttgccaattggcgcagggcagaaaattagctatgacgcgcagcgagataagacgaacggctacacgcaaaatatttcttactttaatagccaggatgccaaaaatatctggcgtgtcagtgctggcggcggaaatcccgaattgcagaagggtgatggtgtatttcgcggcggttaccagcaccgttcgccttatggagaatttggtattgatggtagccataaaaataaccaatacaactcggtgaatgccaattggtatggctcattaacggcgactgcgcaaggcgtagccgcgcatcagaatccgtcgggtaatgaacccagactgatgattgataccggtaatatttctggagtgtctttcaatattaactctaccgtaactaacggttttggtttggccgttgccaatggagtgacaagctaccagcaatcggatgttcgggttgatatgcaaagtttgtctgatgatatcgaagtgtataacacagtgattcagaaaaccctgaccgaaggtgcgattggctaccgaaagattcgggtggtgagaggtcagcaactgatggcagtcattcgtttatccgacggtagttatccgccattgggttcttcggtagtagcagataaaaccggcgctgaaatcggaatagttggagagaacgggctggcttatctggccggattggaagaagcggcacagttaaccgtgcaatgggggaaaaatcagtgtcgtctgacattgccagagaataagggtatcaactccggaaaaattttactgccttgccagtaacccaatgattaattgaccttcagattgacctgaatggctcaggcaattgggcaatagagagtacagaactgacaaaatttaaagtgagtattaatgatgaatttagaaaaaaaaatgagacgtatgacggctagtcagtctaaaaacatgttggtggtgctggcgttaatgctgctcggcactatgaatagtcaggcggcaataaatttggaccggacacggattgttttcgatagtagcgataaatcggtcagcattattcttgaaaataagagtaaaacttccccttatctggctcagtcctggctggaagatgcgaaagggaaaaagattgagcgtcctctcgtcgccttgccgccgatgcaacgtattgatgcaggtcaaaaaagtcaggttcgtattatgaaattgcctgatgccagcacgcttgctacggatcgcgaaacgttattctattttaacgtgcgtgaagttccgccaaaaagtgaaatggctaacgtggttcagattgctattcagaatcgggtaaaactcttttatagaccaacggcgattaaagcggattataaagagtcctggcaggacaaacttcagcttactaaacaacgtgaaagtctgaaaatctataacccgacgccttattacgtgacgctgggatatttgagtcaggataatcgaggtaatttccccggttttgatagtgtgatgattgcgcctttcaatactgaaatcgtgaaaactccgggctatagcggagatcattatagcttgggatatatggatgattttggcggcttggtgttgcgcatatttaattgctcatcggttgagtgccagatccagcctgcggaaaagaataaataatgtttattgccgtttcgttaatggccaaggataaataatgattcctttttttctagctaaattgcgccgcttctatggctcgctggttcttttgagcgcaactttgttactggctccaacggcatatgcccttgattgtgtagaagcgggcaccggcatggttataaaaccggcaattccgattggtgcattggcaattccatccaatgtcgctgcaggaactaaggtctgggaatctaatgatattacggtgacggcttactgcgataatgtgctgggaagtgtccgggatcaagtatggttttattttaacccgttgaataacgcattaggtcagggtttgcagttaggcgtgagttatttaggtcaggagttagaaactaacggtaagggaataaataccaatacggcacctatcgttaaagggcagagcgtaaccgtgaccgtgaccttcagactttatattaaagtgacaggaaacccgccctccagcggcatttatcccggggctaatacttttacggttttccagttggatggctccaatgggcttaaccttactccagcagcgaagaatctaagatattctctatctggattaagttcgacgcgctttattgcctgcggtgcggatttagtggtttatccggaatcacaggtcgttagttttggttcgtttaataaatcgctgttatcaacgacgggaaatgggattagcgcgccatttgcaattacttcagtgaagcaaggctgtttgtccaacttttctattcaggcacagttttcaactaccaatccgttaattggtgataatgccatcgatatgcaaaatggttctaaattgaccatttatgatgacgctaatcaagcggtagtatttaaccgttatgctgattttgccgtgatgaatgatgtgaatcaggtaacgaaaaattataccgctagcctgaatgccattccggggcaagccataaaattggggcagtttgatgcgacggcaatagttaagattaactattactaggttgagacaggcaagtgaagactgaaaagatgcagccagacgaggctgcatttatggtgcacccagattaattgatcaggaatgatttaccttgctggagtactaaatcacaggctttagttttaattttttcagtgagttgggcagtgcccagattattgagatccagacttttaccttcgccggttttcagtaatccccccaggccttcctgatagtcctgacttttggcattttccgtactggtaatgcccaatttactcatcagctgatctttaattgccgaagtgccattggccgataaaacgttattttgaacgcagtattgcaaaatacctgcggcattcgtcatggtactcgcgctgagtgctttatcgccgccgttaagcagcccggtaagcgaagataatgatgaagagctatcccccgatttactgtactcgtccgctgcattttttaccgagtcgaataaactgttggcttgagcactaccggttaccagagtgctggaaaaggccaaagccagtaatagacgatgggtgttattcatagaaactcctgtttcacattgtgggctatagccaaaagcctgaagcactgaagcagttagatagaccgttagtcgttaacttcacgggcagcataacgtaaaaatataacttaggagagcgtgtgattttagctctactgcatatttacagatttagaatccgcatatcaggttgtccgaaagctgataacttatcgggttggataatagaaacacactgagaatcatcggaaatctacccctgagtgacacattatgggatgatcatgacaacaacataatttaggggacgttatggcttcgctgaaagatgtggctaatttggcttcggtatcattaatgactgtttctcgggcgattaataacccggagcaattgcggcctgaaacctatcagcgagtggcgcaggccatcgaagctcttaattatgtgcctgatttttctgcgcggaaaatgcgaggtaacaccacgaaaacctcgacgttaggagttttggctttcgatacggccacgacgccattttccgttgaaatgctgctttcgattgagctgacggcgcgagagtgcggctggaatagttttctggtgaaccaaacttcagcggaagacagtgaacgcgctgttaatcaactgctttcccagcgtccagatggcattatttttaccactatggggttacgcagtatccagatcccagcgcgcttaatggataaaaagttagtgcttgctaactgcgtgagcgacaattcggatgtggccagctatattccagacgatttttggggacaatatcaggcgataaaacgactgattgaacgtgggtatcgccgccctttgtgtttttatctgcctgaaaatacgctcgctgctcaggctcgtcgcgctggcgctgaaaaagcgtggcaggatgccggtctgcctttaagtgatttacgtcaggaacacatgatttggggggatgagcattacccggatgtcgttacactgctaaatgcacactgtcctaatggaaaactagattttgatattttggtttgcggcaatgatcgtatcgcttttctcgcttatcaggtgctattagccaaaggcattaaaatcccgcagcaagttggggtgctcggttatgacaatatggtcggtatcggtgggctatttttacctccgctgactacggtgcaattgccgcataatgaaatcggccgtgccgctgctttgcatttaatccaaggcagaacggacagcgaaattcataaaattccgtgtcctctgctagaaagatcctctctctgactttccaattaaaccgactgcggtgttcatccgcagccgtttaatcctaaatttttcaacctgtttttagcgtccagtattgcccactcgccagcaaggcctggccattatctgcaaaaagtgaaagctggcgcaggccttcacttggataaattcgactggtcaggctagcttcgccattatttacaaacacctctattgatgatttatcgataaatattctaaatgataagatgtcgccagcggggatttcgacgctgcgatagccggaaagacggtgctgcggataatggcgattgaggatcaaccgttgagcctggttgtcgataaagacagatacgccttcatctgcgccctcaattccccccaaacgtaggccgaagcgttcggcgttgctatcgttgagattccattgcaactggatttccagcgcgctggcctcgtcgactatttgtcgggtagcgttttccaatggcaacttttctaactctacgtgctggcgacgcagcgtttccagctcagatatgggctgcatccataacttcccattatccttaatacttaattctcgcggtaaagtcaggcaaccggcccaatattccgctttagaaggcatattggattcccacatatccatccatccaataacaattcggcgaccatcttttgctgtgaatgattgcggtgcataaaaatcatgtcccagatccagctcgacaaaaggttgggcacgatgaaagaccgtgccgggtcgccaggaaccgcgtaaataaccgctctggaaccgattccggaaacggtagccttcggcttttataccttgcggggaaaacattaaaacctgctcccctcccagagtgaagaagtccgggcactcccacatatagccctcgccggtatccgctttggctagaacctgttgaaaagtccattggtgcagcgtttcgccgcggtatagcaacacatgtccgcaatcgacatgatctcgcgcaccaatcaccatccaccaaacgccgtcttgtttccataccttgggatcgcgaaaatgcatgatgccgttcggtggagtcaggataacgccctgtttttcaaaattgattccatcttgactggttgctagacattgcacttcgcgaatagcgccatcatctcccggttgattgagccaaacgtgaccggtataaatcagggtcagcgtgccattatcatctaccgcgcagccgctgaaacagccgtctttatcccactcatcgcccggcgacagtgcgatcggctggtgttgccaattcaccatatcggtgctggtggcgtgcccccagtgcatgggcccccagttttcgtcatagggatgatgctggtaaaaggcgtgataaaggccgttatgataaatcagtccgttgggatcattcatccaacccgccggaggagccagatgataattggggtaaaaagcgtccccgacctgaggaattaattgttgcagcgcatggttagcgcgatccagttgcgttttcataatcattcacttggttgataagttaagagataagtgctggtttcggggatcagcgcgtagcaggaagcaggaaagcagagtcaggcccagcaccatgccgcccatgatcatgtaagttgcagcgaagccgcgtaggtcatagctatgtcccgccaatggcgacaacacgctggcgcaaacctgagtgacaaattggaaacccaccagatataaagtggcggagaggcgtggatcgaactggctggtgatgtatttgaacatggcgatcaataggatcggcagttcaacggcgtgtagcagtttcattagggaaatggtgacggcatcatcagctaatcctgaaccgataattcgcagcgacatgatcataccgcttagtagcagagcttgtttggcaccaatgcgattaaccaagaagggagccaaaaacatgccgcctgcttccaggaatacctgtagtgaattcagaaaaccgtacatttcattgccatggcgcggatctgaaaatagagaagagaaatagaccgggaattgttggtcataaacgttataaatactgacgcccataacaaatacgaccaaagcccaaaaacgtggcgttttaagcaggcctagagcatctgatagggttaatgcgctagatttgccatattccaactgattgagggcatcggttttaacttcccgaagacagagtaataacagcagaaagaccactgccgatgaggatgccatccaaaaattgatattaggattaatgttaaacagcattccggcaaagaaagtggcgcaggcccagcctaaagatccccacatgcgtgctttgccaaattcaaagccgacaatacggctaacgcgttcggtataggattccagtgcgccgatgcccgcgaagaaagtggctcctatatataatccgcccacaattgcgccagccagcatgttaagtcgcaataacggagcatagataaagatgaagaaggggccgctgagcagcaataagccgccaattgcccacaacagatttttccgtagccctaatttatcctgaataaagccgtatagcggttgggcgcataacgcagtgagcgcgatggctgaaaatgtagtgcccgtttctgcgccttttaaaccgacactttgatttaaccatatggaaaataaagagaatgccgaagaccaggtgaagaaaaaagtaaacagcagtccgctcaaaatcagatattggttacgaatgttgcctttcatagcagtaccctgatggctttgtatggcgctattgttaacgttaacttttcatcatgagaagctagcgtcttctttatttgcgatgttaatcacaaatgttaacgttaacattaatgggttgtgagctggataccataaattaattggtggacaagaaagcagaggaatacaggaaaaagagatgttgatttgttttggcgatgattattagcatattgatatgcaaaaacgattgccatagggtaaatggctgatatagcataattgcccttatcttttgttgcctaaaatggcgcatcccatgatgaatacgtcaaataagacacaatccctcgatgggcaacgttcagcctcattatcttcgtcaacacttcccgatgctgtccggaataaagaaagtgttcaacgtatcctggttatcaaactgcggcattttggtgatgttcttttaaccaccccgttgttaaatacgctgcgagaaaactatccgaatgcgttgatagatgtgctgctttatggtggaacagaagcgatgctggcggcaaatagcaccgttaatcatgcttatatcgtcgatcgagatttaaagcatgctggtctcaaggcacaaatttgtggcgaaaaagcgttgtttagcgatctgaaaaaacagcgatatgatctgatcctcaatttatccgatcaatggcgcgccggcgtttattgccgtttattacagcctaaattcagtatcggtattcgttttcctaaacgggataacgggctgtggcgctactgtcattcccgactggtggatattccgcgggcagaagaacagcatacggtattaaataatctggcgattcttgagccgcttgggattgagaatatcagtactcaagtcacgatggcattcagtcaggctaatatcgatcgggtcgttgagatccgccaacagaatcaacttgatagctatgtgctgattcaaccttctgcccgttggcgattcaagacatggtctgccagtcatttcagccaattgatcgattcactgactcagcaaggtcagaagatcttgctgaccgggggacgcgactccgccgagttggattatattgccgaaattattggcggctgcgcgcagcctgagaagattattaatctggcggggacgttggatttacctgaattagctgtattaattgatcaggcaaaactatttattggggtagattcggtagcgatgcatatggccgcagctctgcaaacgcccgccgtggtgctgtttggcccaagtaatctgcaacagtggtatccttggcaggcgccacatacattgatatgggcagggaactatcggacgcttcctcagccaaatgaaattgatacagatacaaccgagcgttatctggacgctattccggtgaatgaagtgaaaattgcggttgatgcctggcttaacggctcagatcattaatccatggccattcattctccccttaacccgtctgaattgagagtaccatgacgacaacattaagctctccggaggttcgctccccggaaatatctttggccaatcgcttaagcggtttactggccggctttgctgcttttctgctaggggtagctctgccgactgccacttctttcgtgaatattgcgttggttctgattattatttgtttgattattcagcgcgacaggctgcaattcaaagtgttggcaaccaacccaattgtttatttacccgcggtgatgttcttgctgctggcggcgtcattattattccatcataacgattacggttctgagatggtgggtaaaatgaagaagctgctgtatgtactaccgctggctttatttttcctgcatcagaatcgtttgattaagctatttggtgccggtttcctgctggcaaacgcggttatattggcaggttcactattggttggcgtattgcacgtaccgctaggcatgatcgacccggcgaatccgacgatatttaaactgcaaattacccaaaacttctttatggcattagcggcggtattgtggctgatgctggcgtttaaaagcagcggttggaagcgtttgggatatggcgttctggttgcaggtgcttgctatagcgtgctgtttttagtactgggtcgtaccggttatgtggctctggtcgtagggttaggatcttggctatttttctcattgggaaaccgccaacgtcttggtctggtggctttaggcattattgcatttgctattatcgcgctggttcctaaccgggcaactgatcgtattatgctgggcgttaatgaaattaaagcctgcatggcatcaacttccggcgatgaatatcaggcttgtaactcttctatggggcagcgttccgcctttgctatggaggctgcacgactgattaagcaggcacctattatgggcaacggtgcgggcggtttcttctattcgaatccggaaactggctataagatcaataacccgcataaccaatatctgctggaaactattcagtctggtattttgggcgtggtgatatttttggcctgggtagtgtgctgtttccgtgcagcctggcagcaggagccgaagttacgcaatctgctgctggcattactctgtagctatatggcctgtaatttctttaactccttcctgctagattattcagaaggccatctgttcatgatactggctgcgatactggcgggatattcggtatcagcgaagcaaaaaaggcctcagacgctataagttagccctggctgatcgacgataaaacggctctttattggagccgttttgcgttgtcgctctcctaacctatggctggcttctggcaacctgcaaacttgtctgagagggactcaatctgttttgtcgtggattctggcggtcaaaatagtcagatatgcactttatctgattagctcgtaactgcaagccaggggtaactgagcgcccgtttttagccgtaataaacccaattatatatttcccattcaaatcataaatctcagaatctagaaaccattttattctcattctactcagccacgttaaataacccggagcagcgttttttttcttattgggtaaataatcgccattatgggtacagcaccggattaactactctgttaataaggctgctcttagcaggcatagcgcacaggtttaattcaggcgtgggcagtatctggaatggcatactagaacgagtgccgaagtggcgctgtagctggatctgagaggtttgatgcggtgagtttgtagatgcaggtttgcatttatagtgcagaattttggtgagtagaataataacttggtagtatgaaatttgtactgtaaataagactgtttgatgacatatctgaagctaacggaattacattatattctgtctccgctgtctgtatatggattattttctcagaaaaaatagaggtttgatcagcttaaagtgtaatagttgagtagctttaggaaaatatagataattcattaaataatgctaataatttatacaaaataaacagtaaaaaaattaacaagccatcacgatctctatattatcggttttttatttgattttttgtgaataaaaaacaggtgaaaaataatttaatttacttttttctatcaagatggcgatatttaaatgaatgaatcatgactaagcattggtgatggatatattgataaataataattagtttgttttctgtacagccgagtgaaaatgaatttgtggaaaataaatactcattttttagtttatatattttaattagacgtttgcggtgggtttttatgctgcttgatttgcttttgaccgactccaatgttgtgagaatctaatgcatagaaaatgagtatttattatttataagtggataaatgtaacttaaagcacttaacatgataataacatgtgttattggtgtgcggtttttttcgaattaacagtcactatctgttataggaataatcctattattgcctgactctattcatttgctcttggcaatagaatgcttatgaatataggagttttaagcaggatgtttttatttttaaacactcataataagattgagtctgtagtgtggttatcactacatttttaacgttaaaacctcagggatagcaaggattaacaaaaatttattttccatggtttgttttttattaatttattgattttattgtatttttatcattttgctttaccgatctaactattaatcatagatggtgtaatacctaatatcaaggcggggtttatttgttttgaattggcagagttatctgattctttgtcattaaaatttaatgcgcggtgattataaggaaatcaaaacactgtggtgaaattggctaataaatttaatgtgatgcgtaattcgttgattgatagtaatcataaatcatgatgtggatcacttttggccatttgtaatatgtgtgataattttttcaatgatttacattttgaaaaatccagcctactttcgggatattacgcaatagttttaaatctgactatgataaagatgtatttctattcctgagctggttcaggttgattctgctgatcgcctaaacagaatctacatttattaacctatccaacgtcattgagagaatcatggcaaactcatcagcgaataaactatcgttacccgcactgacttctcttgtagttggttcgatgattggcgcgggtattttctccctgccagcgacattcggacgagcaacgggtggattcggcgccattattgcctggtgtatcgccggtggcggtatgttaatgctggctttcgtttttcaaacgttagcgcagcgcaaacctaatctggattccggcgtattcatttacgctaaagaaggttttggagattatctaggattcgcctcagccctgggtttttgggccggtacctgtattggtaatgtctcttattttgtgttgatcaaatctaccctaggcgcgtttttcccaatattcggtgacggtaatactattccggcggtattagtcgcctcggtgatcttgtggggcttccatattctggtattacgcggagttaaagaagccgcagcgataaataccattgccaccttcgcgaaaattatcccaatctttatctttgttatcgttctgatttttgcctttaaaggcgatgtctttgcgctgaacttctggggaacgccggatgtcgttaaaggggctgatttatctcatcttaatgattatggctacgttggccacgcggcggcggcaatgagcaccgtggtagccgagcctgaatcactattctcgcaggtgcgcagtaccatgctggtcacggtatttgtgttcctgggcattgagggtgccagcgtttattcacgttacgctaaagaacgcagtcacgttggtattgcgacggttttaggctttattggcgtgctgtgtctgctggtattaatcaccatgctgtcttacggcgtcatgctgcgacctgatttagccgctctgcgtcaaccctccatggccggtgtattagaagccatagtaggacgctggggcgcaatatttatcagcgtcggactgattatttccgtgctcggtgcttatttatcctggtcattgctggcggccgaagtgcttttttctgcggccaaaagtaacagtatgccaagaatatttgcgacggaaaatagtaatgcagtaccctccgctgcggtgtggctgaccaatatttttgtgcaaatattcttagttctgacgctatttaccgattatgccttccaactggcactggagttaaccagttctctaacgttgattccttatctgctcgtgggtgcttacggtctgaaattagcctggaccggcgaaacctacgaaaccaatgctaaaggccatcgaaaagatctgatttttgcattgatcgccaccttctacgcggcgctgatgttgtacgccggtggcatgaaatatctgctgttgtccgccattatttacggtccaggtaccatcctgttcattatggcgaaacgcgagcagcatcagaaagtctttaatggcgctgaaaaaatcttgtttgccatcgtgattatcgcagcggcggtcgcgctgtatagcattttcaccggaatcatcaccatataatttactggagctattatgtcggataagaaaaccaagaagtcaggcgcttacggcgtacattcagaggttggtactttacgcaaagttctggtttgcgcgccgggtaaagcccataaccgtctgacaccaagtaactgtgacgaattattatttgatgatgttttgtgggtagaaagagccaagcgcgaccatttcgatttcatgaccaaaatgcgtgaaagaggcgtggacgtagtagaaatgcacaatctcctgactgagaccctgcataatccggtggcaaaaaaatggattttggatcagcaaattgtacctaatgaagtttcgttaggcattttgcatgaaacccgcagtttcctcgaaggtttggatccgcgaacgctggctgagtttctgattggcggtttatctacgcgtgaattacacgaagtgggtaagtgcgacaaagaagaattgaagctgattcgtgaagccgtcggtattaccgagtatttactgccgccgttgccaaacactttatacacccgcgataccacctgttggatatacggcggcgtgacgttaaatccgctgtactggcctgctcgccatgaagaaaccatcctgactacggcgatttataaattccatcctgatttcgccaatgccgatatcaatgtgtggtggggggatccgactcagcaccacggttcagccacgctggaaggcggcgatgtgatgccgattgggaataaaaccgtcctgattggtatgagcgagcgaacttcccatcaggcgattacgcaactggcagcttcactgttttccaataagaaatctggggttgagcgcgtgatgattgcggcgatgccgaagctgcgcgctgccatgcatctggatacggttttcaccttctgcgatcgcgatgtggtgacgctttacccggcgattgttaatcagatccagactttctcactacgtccggatgatggcccgactggcatgaagctgagccgagataaaggcacctttgttgacgcggtagccggtgcgctcaatctgaaaaaactacgagttgtggaaactgagggcaacgattacgacactgagcgccagcagtgggacagcggcaataatatggtcgccatctctccgggcgtggtcatggcgtatgatcgcaataccaaaaccaacactcagctgcgtaaagaaggggtggaagtgattgaaattgtgggcagtgaattaggccgtggtcgcgggggcggtcactgtatgacttgcccgcttatccgcgatgccgttgatttttaattgctgataaccgccagctgcggaacggttctcgccagctggcgacagtgctcttaaaaaatagtcgagagtggacagtgttatcacgctggtttgctgtcggctatctgtatttaaaatcgccgagtgttttgggcgacgtaatagatttttagaaaaggacggcactgtgaaatacgtttatacggtactttttctgttaattgtcacattaaccactctttttgcctttcagaacagcggcgccgttcaggtatcgctactctttaatgagataaccttgcccttgtccgtgctgatcgtcctgatttactttttgggcatgttgactggcggagttctgctaacgctgatgaataagctgattcgcaaagtgataaaaaaaaccgataacaaaaccgatagcaagaacgcagtcaatgggcgctgagataagggataaacagaatgtaaatctgatgatgttaggccgtttgtttctgtcgttgcgaagctatctgcggctaatcctaaccacaatgtcatcatattttcactttttaacccgatttttgctggtgcgtttcaaccgctgttgcgcaattgcaaccccaatatttgattgaacgagatctttatagtgaagacaaaaattgtagtgactctgttggcaacgctgttattggctggctgcgataaacctgcgcctgaagtgatggaaagcgtgcgcccggtaaaaatatttacggttgaagacagcggccagaacggcgtgcgttatttcccggcgcgattgcaggctggggatgaaacgcaactgtcatttaaacgtgcgggacagcttcagcaattactggtgcgagaaggtgaacaggttaagaaagggcagaatattgcgatgttgaataacaccgatctgaccttgagagtacgggatcgccaatcggcgtttaatctggctcgcgatcagttcaatcgttttaataccttgcaagggcgcaatgccatttctcgcgctgagctggatattcgccgagccgagctggaatccgctcaggcagcgctggatatcgctcgcaaagagctgagtgatgccaccatcagcgcgccttttgacggtgtgattgctaacgttagcgcgcgtaatcatcaggtcatggccccggggcaggtggttgcgaccttgagcgcactggatacgctggacgtggtatttagcgtgccggaacgtttatttaccgcattggatattggtaacaaggactatcaccctacggtgcgtttaaaccatttaccggatcgggaattcctggccgaatataaagagcacactacctccaccagcgctggctccatgactttccaggtgacgctgaccatgaaacgtccgccggacttaccgctgttgtctggcatcagcggtagcgttcgtatcaatacgcataaattaactggttcgacgaacgcatcgattattgtgccggtagaagcggtatttaatcccgatagcacccagctcaatgatgcgcgagtttgggtagttaaagaggataaaggccagctccacgttgaagaacgggaagtgcaggtcgggcagctgatggccaacggtatccggattacttcgggtttgaacgacggtgagcagattgttgccgccggtaccagcgagcttcgtccacagcagttggtgcgggcgtgggtccgtgagcggggtctgtaatgaagctaacggacaatttcatcaacaataacacgcgaatctggctaacgattctgttgctaggaattggcggacttattgcctatctgaatatcggccgtttggaagatccggcttttaccattaaaaccgcggtggtagtcactcgctacgaaggagcctcggcgcagcaggtggaagaggaggtgacgctgccgctggagaatgccatccaggagctgtcttacgtcgataacgtcaggtcaatctccagcgccggtttatcgcaaattaccgtcaacgtaggttcccaatacgggccgaacgaactgccgcaaatctgggatgagttacgccgaaaaatcagtgataacagcgcccgtttgcctcctggggccggtacgccgctggttaatgacgattttggcgatgtatatggtttcttcttctcgctatcgggagagggctacaccaatcaggatttacgtaattttggcgagcaattacgccgcgagttggtactggttaacggcgttgggaaagtcgctattgccggcattttaccggaagaaattcagattgatatttcgcgggcgcagatgaccgccgccggtattactccgcagcatttatcggatttgctgagtcgccagaacgtggtttccaactccgggcaactgttggttggcagcgaatcgatccgcctgcatccaaccggtgaatttaatagcgtgcaggaattgggaaacttattggtcagccagccgggcagcccgaaaagcgtctatttgcgtgatattgccaccgtgactcagggagtgactcattcgcctacaaatatttatcgtgcgaatggtcagcctgcattgggggtggggatttcttttgcgcctaacgtcaacgtcgtcacggtggggaatgccgttaaattgcggttagcgcagctagagcctgaacggccatccggcatgcacatcagtattttttacgatcagtctcatgaagtggaaggcgcggtaaacggctttatcctcaacttcctgctggcgttactgatcgtggtcgttaccttattaatctttatgggcgcgcgcagcggcattgttatcgcgctctctctggcactgaacgtgctggggacattattgattatgtggttgtttaatattgaattgcagcgtatctcccttggtgcattaattatcgccctcagtatgttggtggataatgccatcgtggtggtggagggagtgctggttgggcgccagcggggagataatattttcaccgcgatcagtaaagtggtgaagcgctcgatgttcccgttgctgggcgccacgatcatcgcgattctggcctttgcacctattggtttatcaaatgattccaccggcgaatattgccgctcgctgtttgaagtattactgatttcgttaatgctgagttggttcacggcgctgaccttaaccccggtattcgccaaatgggccttccaaaaccaaaaatcggctccggttgatgaagataagccggttaagcagccttatgacggctggttattccgtaactatcgggtggtgttgaataagctattgcagcatcgcagcatcacgctggtggtactgactgcgatgctggtggcgtctatttacggctttggtagcgtgcggcagagctttttcccgccttcgaatacgccgatcttttttgtcgacttatggctgccgtatggcacggatattagctataccgaaagcatcgcggcggaagtagaaaagcatatcaaggagcaggagggcgttaccgataccgttggcactattggtcagggcgcgatgcgctttatgctgacctataacggcgagcggcaatatgctaactatgcgcaaattatggtgcgtaccgatcggttgaatcgcattcccggattgatcgaagaaaccgaacaatttatgcaggatgaatacccgcaggtgaatgcgcggttgaagcgcatcatgttcgggccatccaataacagcgcgatcgaagcgcgatttaacgggccagatccggacgtattgcgatctctggctacgcaggccgaaaaagtgattgtggccgatcctctggctgatggcgcgcgtcatgattggcaggatcgcagcaaaatgatccgtccgcaattctcagactatctggggcgtgaactgggcgtagataagcgtgaagtggatagcactctgcggatgagctttggcggcttgccggtcgggttgtatcgggatggtacgcggttgatgccgattgtccttcggacaccggacgccgagcggttgaacgcagaaaggctcaacgatgtcatggtatggagccaagcgcgtcaggcgtttattcctatcgataacgttgtcaccagctttgaaaccgaatgggaagatccactcattatgcgtttggatcgtaaacgcacgttaacggtgcaaaccgatccaacatcggaaggcggggaaacttccgccgagttgttacagcggatcaggccgaatatcgaagcgatcaaactgccgtcgggctatgaactggagtggggaggcgattacgaaagtacgaaagaggcacagcaggggatcttcaccagcttgccaatcgccttcattatcatgtttgtcgttacagtgctgatgtttagctcggtacgtaacgctttggctatctggctaacggtgcctttagctttgattggcgtgaccgttggtttcctattaaccggaattccttttggttttatggcgttacttggtctattaagtctgagcggtatgttgattcgtaacgggatcgtattggtagaagaaattagcctacagcgacaggaaaaaccgctgcgggatgccattattgatgcctcgaccgcccgtttacggccaattatgctcacggcctttaccacggttctggggctggcgccgctgctgagcgatgcgttcttccaaagtatggcggtggtgattatgttcggtctgggttttgcaacggtactgactttactggtattgccggtgatttacagctgtatgaatccagagccaaaaccgcagccgactaccgagtaatgtattttttcagctaaaaaaccgtccgatggacggttttttttcggctgtggtcagaaccttgtttataaaaacgcttttttatcgttcctcgattttcccatctgtgcgccagctctcttattaactgaattaacaaccctctttgtttcacaatgaaactcgaatttccattggtggtttcataatggaacgttttccctgccggttactcaacggtttttctcgctctatagtggttttagccaaagtaaaaccgtctcccgccaaagaccgatgctgacccgagacgccaccttctaaaatacatttacgcttcaggagccagatatgcttaaagtcattcaatctccgtctaaatatatacaaggcgctaacgcacttcagtctattggtgagttcgctaagctattggcaaataactatttcgtcatcgccgatgacttcgtcatgaaactcacgtcggataccgttggcagcagcctgcaggtcagcgatgttaaatatcacttcagccagttccgcggcgaatgctctcgtaaggaaattgaacgcctgaccgtagagctgaaaaaacacggttgtaacggagtgatcggtatcggcggcggtaaaaccctggatacggcgaaagccatcgcccactatcaacatattccggtggtcgtagtgccaactattgcctcaaccgatgcgccaaccagcgccctgtcggtgatttataccgaagaaggggagtttgctgaatatctcatttatccaaaaaatccggatattgttctgatggacagcgcgattatcgccaaagcaccggtgcgtttattagttgccggtatgggggatgcgctttctacctattttgaagcacaagcctgttttgatgccaaagctatcagtatggcgggcggagcctcaacgctagccgccgtgacgttggcgcgtttgtgctacgacacgctgctgacggaaggttacaaagctaagctggccgtagaagccggtgtggttaccgaagcggtagaacgcattattgaagccaacacttacctgagcggcattggttttgaaagcagcggtctggcggcggcgcatgccattcataacggttttaccgtactggaagagtgccaccacctgtatcacggcgagaaggtggctttcggtacgctgacacagttggtgctgcaaaacagcagcatggagcaaattgaaaccgtactcgatttttgtcagcaattggggttacccatcacgctgggcgaaatgggcgttcatcaggatatcgaaaagaaaatccgcgcagtggccgaagccagctgtgccgagggtgaaaccatccacaatatgccgtttgccgttacgccggacagtgtttacgcggcgattttggttgccgataggctggggcgcgctttcctcaactaagttgaattcattgtgataacgaaccgggccgcctgtgggtcgctcggttctgccccacacgggtaaacgagcctctttatggagcacagcatgaaaaaactgattaatagcgttgaaagcgttttacaggaacaaattcaaggtttagtggaagcgcatccggaactgactctgcatcaggaaccgctgtttattactcgccgagatgcgccggtacaaggcaaagtggcgctgatgtccggtggcggcagcggtcatgaaccgatgcactgcggctttattggtgcaggaatgctggacggtgcctgtcccggtgagatttttacttcgccaacgccggatcaaatgttcgagtgcggtcaggctatcgacggcgggaaaggcgtgttaatgctgataaagaactacaccggcgacattcttaattttgaaaccgcagccgaactgctgcacagcgaaggcaccgccgttgccacgctggtgattgatgacgatgtcgcggtaaaagacagcctgtacaccgccggacgccgtggcgtcgctaatacggtgctgatcgaaaaattattaggtgctgccgccgaacgcggtgattcactggatgaatgcgtggcgttaggacaaaaaatcaataatcagggacattccatcgggattgccttgggagcctgtacggtgcctgcggcgggtaaaccgtcctttattttggctgaaaatgaaatggagtttggcgtgggtatccacggcgagccgggcattgaacgccgttcctttacctccctggatagcaccgttgacgcaatgttccagacgttgatcgaacacggacagtatcaacgcacgttgcgccactgggatcgccagctgggcgattggcaggaaactcgtcagagcaaacagccgttggcggcaggggatagagtcgtggtgctggtgaataatctgggcgctacgccgctgtctgagctgtacggcgtttggcatcggttagccgcgcgctgcgccgagtttggtttgaaagtcgaacgtaaactgattggctcttactgtacttcgctggatatgcagggtatgtcgattacgttgctaaaagtggatgatgaattactcacgctgtgggacgcaccggtcaatactcctgcgctgcgttggggttgttaaatgtcggaggaaaaaatgggattaaccaaacaagatatcgtcaattggctgcaactatgcgccgaggtttttactcaacaacgggatttcctcactcagctagacactgaaattggcgatggtgatcacgggctgaacatgaatcgcggttttaacaaagtggtcgaaaagctcccttcggtggcagacaaagatattgggttcatcctgaaaaacaccggtatgacgttgttatccagcgtaggtggagccagtggcccgctgtttggcacgttctttatccgagcggcgcagagtactaatgctaaacaaagcctcgatctttccgctctgtgccaaatgtttaaggacggcgttgagggcgtagtgatgcgcggtaaggcagaacccggtgataaaaccatgtgcgatgtctggtgggctgttgtggatcagttggaaaaggccaatcagcaaggtttatcagtggtggacgcattgcaacaaacggtggaacgctcgcagcaggcgctggccagcaccattaccatgcaggcgcgtaaaggccgtgccagttatctcggtgaacgcagtattggccatcaggaccccggcgcgacttcggccatgctaatgatgcaggcgttattgcaggtaaccagccgttagccatgcgcgttccatgaactgcttgccataaagtatcaaaagtgtgtccgtcaggccggtgcgataaccgcagggcagtatcagattccaggaggaaagatggtcaatatcgttgtagtttcccatagtgcgttactggctcagggcgttgccgagctggcgcagcaaatggcgcagggcggatgtcggttggctctggccgcaggggtggacgacgtggatcatcccatcggcactgacgccattaaagtgatggaagccattgagtcagtttacgatcccgccggggtattggtgttgatggatcttggtagcgccgtgctgagcgctgaaaccgcgttggacctactcgatccggagatggcggccaatgtgttgctgtgcgcggctcctttggtagaaggcacgctagcggcggtagtcgcggcatcggcaggctcatcattacaacaggttcgtgccgaagctatgggcgcgctggtggcgaaaagtggccaattaggcgaagaaatccagtcggaagaatctggctctgcgacgggattcggcgatgatgcgcaaagcgtcagctggcgagtgcaaaatcccaacggtttacacgttcgcccagcggcaaagttggtggaggctttggcaccttttgacgccgagctactgctggaaaagagcggtaaatgcgtgaacccacgtagcctgaaccaactggcgattttgcaagtacgtaaaggggataccattcgcctgctagctcgcggagctcaggccgaattggcgctggctgcgtttgaacacttggctcagcagcattttggtgaatcagtcgcgaacggggataacgcggaactagcgggaattatggtgccaaacggagtcgttcgtgggccaatactccagcttcctcctgcgatgacggcgtttattccccgcactatcagtgccgaacaagtagcggacgaacagcaacgtttacaacgggcgctgatccaaactgcgacagatttggaatctctggctgcgcaggtgggagaaacgcttggtgaagaatttggggaaatattcagcgctcatcagctcctaatcagcgatgaagagctgcagcaggcggtcaatcagcggatggctcaagaacgtgtttgcgccgagtccgccctgcaaagtgagttgatggcaatggccgcggattatcaggcgctggatgatgaatacctgcgggttcgcgagctggatattcgcgatattcttaatcgggcgctgggacatctgaccggtttgccgttggtttcgttgcacattggtggtagcgcgttgctggtggcggatgagctaatgccatcggcgttggccgggctgcgccgacagcaagtaaaaggtatttgcctgagtcaggggagcacggtgtcacacagcgcgatcctgtcccgcgccttggggattccaatggcggtggggatgagcggctgtttggatgccactcatacaggcatgatggctgaactggatacagccagtggcgtgttaaaaatcaagggggaagctaccggagcgaaggagactcgccatcaaagtagctatattccagcaaaataatatgttctcagcgatatgagaaaaggagccagaattggctccttttctctgcttaactatcaagatattaaaccgtttctccgcctttaaactgtccgatatccagccggtgcagcttcactttacgccacagtgtggtgcggccaatgcccagcaaggttgccatttcattaagctgaccctgacacaccagcgcggcgcgaattatcgcctgccgttctagctcttgcagtgatagcacgggctgcggctgcggggcgtccggttcaagaagcaatttttcacccagcaaatgctcaggtaagtcattgagacgaattcggttattgcgacaggacatcgcagcgcgttcgacaacgcttttcaactcctgatcgttgcccggccacggatactgattgagctggcgattaacgtcttcatcggtctgatactggcagtgaaaatgctgccctaaatcccgcagggtatggtgtaccagcagttgaatatcctgttggcgctggcgtaacggcgggatatgtagttcgaaagactgaagggtatagaacaactggcggcgaaaacgcccctgtttgactagcagcggcaaatccgcgccagtggcggcaataatccgcacatccaccggaatcacccgattggaattgacgcgcatcagaatgccggttttaacgatctgcagcagcgcggactgcatttccggcgacaggtattccacctgctccagatataatgtgccaccgttggctaactcgaatttactcggttgtccggcctcgccttcgctggcatcgctgccgaggaattctcgtgccattaagctttgcggcaatgcctgacagttcaaagcgatataagggccatcggatcgttcgctggcgttatgaatcgcctgccctagtcgctgttttcccacgccttcttcaccgtgtagcaagataggatgctggcctttagctgcctgtttgccgtaacgaaccaaacggcgcatttccagagagctaaccggcatctcatcgaaggtatggctggcccggcccaattggttgtgtaccatttggcgcagcagttcctgtggatgcaacaatgcgataaagccgcaacgatcgccgtcgggtatgggttttagcgtgagtaacgccggaataaactgctgttggttctcaaacgtcacctctacgtgactgagaggactgcgctgctgaattgcgtgggtcagcagagcgggaagcgtcagtaactggttgaccggttttcccagactattggttgcatccagccgcaaaatggcggcggcgcgccgattgagatacagcaggcagccacgctgatcccaggccatcacgccgtcctccacgccgtccagcagggcgtttaactcattcaaatggcgattggtttctgccagcaagctgtccgcatgcagggaattaccgatttcccgcgcgatagccagagtcagcggtaaatcactggcggctttttccgttagcaaacagcccaacacgatcacggctcgctgtcgcccgctgttgtcgtataccggcgttgcgcagaaatgccacggatgtagcgccagcttaaagtgctgactgccgctgacctgcattgggttaccttcggctattgctagcgccggagcgttagtaccgatcaaaccttcggcccagtagctaccggcggtaaaacctaattcactgagctggcgcagcgttttcggatgaccgcattgccacagggtacagccgctttcatccagaataagcaggctgcactcgcgggattccatatattcatacgcatcttccagcgccgcttgtcccagaaccaacagatcgtttttacgctggcatatcgagctgaacgttgcgccagccgcccgatgcggaattcgccaagtggcgggttgcatcagtttatgacagcgttgccaggaatcattcagtgcgggcgtaaccgccggcgcctgagagttgtaagctgattcagtaggaagcggggcagactttggggccaaaatagatttacctcaaccagacagtgatctccaaaaaccgagaatcactattaactctgattattgtctgaattgctgtgaagccgcaggcaaatgcggctgtcactttattcgcagcgaattgactgagggaatagtgagctttcaacctatcaagctttagagtctggatgacgccagtgaatttgccccggcagaatcagccgctgctgttctaacggttgctcggcgatcagagcggtaaccatctcgaagctatgacgcgctagcccttggcagtcctgagcgatggtatcgatttttagcggcaggcagtcaaacaggtaatgatcgtcaaagctgcacaggtgaatatcgctatccatcaattgatattggttcaggtaacgcagcaccccttccagcaggccacaggcggcggtaaataccgctttcggtggtcggcccaattgagcgcaaagttgagcgatcatttcatagccggagctaggcagataattgccgttgagtatccattccgggcgacattctacgccagcgcgctgtaaaccctgctgaaatccgctcaggcggtcgcgcgtcggtgaaattcgcggctggccgccgaggaaataaaactcatcctgatgttgctgcgccactttctccaccagcgtggcggtagaggtaatagaatcggtgattaccagtggaagatccgattcgccgatcagccgatccatttgtatcaccggcagccgagtgttgatcttttggtattcgctatcgttcagctggctggaggcgacgatcaaaccgtcaacctgacgctgcaccagactgttcaccgccatcatttcctggctaggattttcatcggtgcaggcgataagcagttgtaacccggcttcgcgacacagcatttccagctcgcgggaaatcagggcaaaaccatgattggtcatttcaggcaccaccagacccagcgtatggctgcgggtcgatcgcaaagaacgagcgtggaaacttggctggtaattgtgttcgttggccagagcgataatgcgatcccgggtttcgtcagaaacacgatattccttactgcgaccattcagaaccaggctggcggtcgatttagacacaccagccagtttagctatatcgttaatagtaatacgtttactgtttttcactgactgcatctgccaccgggaaagatgcccttattctaacatgggtgacagtaacaaccagtgccgcaggtgcagttcacccttgccgctgaaaattgcctgtggttcaggctgagggaaatagctggaagtcatgacgccttcaccattgttgataaagatttccacgctacagcggtcgaaaagcagctgtaactgatgcacagaaccgcgccagtagcggaactctcgctcgcctgtacgcagattattgcgactaagagtcaggcgctcgccgtcccactccagcgtcatggtgtcggccagttgtagggtgaactcgccgctgatttccaactggatttccgcattgtcgatgcgaaacggtggtgcggcatcggcgcttcctttccactggaaaagaacggtgcgtagtgcggttaattcacgggctggttgctgaataattttgccattacgcagcgacagctcgcgcggactgctcatcgtgtgaatccagccgtaattcactgttggctgatataactcatcctgattcggaatgcccatccagccaaacagtaaacggcggccatccgctgccagcgtggtttgtggggcgtagaattcgaatccggcgtccagctcgtggaaagcaccgtggttaaactggccttgctgataatcgagttttccgcagacataaccggcctgataagtattgcgataacgttcggcctccgctgccagcccttgcggacagaagatcagcacatcttcgtcgccaagcgtaaacagatccggacattcccacatataaccgaagtcattcaaaccattgataccagaaccagcgatttcacccagactttgccattgatgcagatccggcgaacggaacagcaacactttgcctttcagctcaagatcctgtgcgcccagcaccatgtaccactgaccgtcgtgctgccaaactttcggatcgcgcacatggccggtatagccagcaggtaggctcagtactggccccagcttatcgaattctccgcgcgcattctctcgcgccagacattgaaatgcggtgcggctaccatctggatatttcacattaccggtatacatcaggtgaatgcgttcgtcgtggatcaccgcagagccagagtaacagccgtggctttcatattcttcgctcggtgccagcgccagaggctgatgttcccagtgaatcaaatccgcactgcgccagtgtccccaatatttactgccgtgggcgcaggccagcggattccattgataaaataaatgatagtagccagcgtgatagataaaaccgttaggatcgttcagcagcccgatgcacggagccaaatgccagccgggccgatgtggatcccgcgcggcccgaacctgaccggacatcaccgccaacgtgagttgtttgagtaaactggcttcttgcattattcactgtccgttttgtatttcagcagcagcgagatgataaaggccgagctgaaagcgataaccaaaccaatcagatagctgacaatggcactgctttgaacgatagccaaaccgggaatgccggttaaaccaacggcggtcataccgacgtgattggcaaccacccaagcaccgcccagagcgccgccggctagtgcggccagaaacggcttcacaaagcgcaggttaataccaaagattgccgcttcggtaatacctagcatggcagagaaggccgacggcactgctatagccttgattttgacatctttggttttgaagtacaccgccagacaggcaccgccctgagcaacgttagccatcgaccaaatcggcagcagaaagttaacgccaatgtttgggttacccagtaatccggcctcaatcgcgtggaaactatgatggataccggtaatcactatcaccgaatacaggccgccgaacagcaatccggcaaaccagcctgcgtgggtgatcaaagtgctgaggatcattgaaataccgtcgccgagtacccgacctgccgggccgatgaacagcagtgcgataaaaccggaaatcaccacggtgaggaagggcgtcaggatcaaatccagcgcgttaggcaccacttttcgcagccgtttttccaccatgctcataaaccagaccgccagtaacaccggaaacacggtgccctgatagccgatcatggcgatttctaatccgaaaaaattcatggtgtggaagccgcccgcaacgccccaggcgttggtcagtgccggatgagtgagaatcccgcccaacgtggcacccaaataagggtttccgccgaactctttcgcggcggtaaagccaatcagaatcggcaaaatgatgaaggcggcggagctgaacatatccagcatgataaagatggcgctgtcggcgtcggcccagccataggttttcaccatccccaacagacccattaataggccagaggcgacgatagccggaataattggcacaaaaatattcgacagtaaacgagcgacccgttggaacggattgagtttttttgcggccagatcggctgcttcagatttactggattcgtttacgccggtttgtcggataaattccgcgtgaaccttattgaccaaaccggtgccgaaaataacctgaatttgaccggcgttactgaagcaaccttttacgccatccagtttttcgatggcggatttttgtaccagattatcatctgccaataccagccgcagacgggtggcacagtgggcggcactgacgatattttccttgcctcccagcagcgggagcagagccgaaacggtctcagtcatgttcatttttttccctcattctatccagcaaagccgcgttcagattcgcatagcggcctttctcgtagcgatacattgttatttatatacagggtgactttatggtatgtccgccgtcattgcggttcgacggccagttattatcagaaccaggtttccatttgcacaccaaagttccattggccaccggcggtaaaatcatttttaccgaaagcatcctgctgagagtagttatccagatctttgctccagtccatataggtagcgaaaacgcgcagttccggacgactgaagaaattcccaatatcaccggctttaaaggttggtgcgaaggtcaatttatagaaaccgccgctgacatctttatagttgttgtagccccgtgggtctaaattcatatattggtaggtgccttcgtaggccagcgcaaagttttcggtaatttcctgaataaagcgggcgttgaatgtcacccatttatagctgtcaccttgaacataacgatcttcactctgctgagccataatcgccggtgccagactccagttcttgctgagcggcgtggtgccgtaggtggcgatacgccaggtatcggcgctttcgttgagattgccgtcggagccaaggccttttacttcggcacctaagccgtggccgtaaagcaccgcgattttagctgttccttcgcgcaggccgtagaagctgtcgccgtggtaggccagcatagcgtggaagcctttctccgctgcgttatcgctggcgacaatgccgttgattttccgctgatcgttatccttggcacgcaggccacttagcatgaactggaatgggccagcgaagttattggcagtgaaaatgtagttctggatgtcatcatcgatgccttcaatggcaccgaaattacgaccgtaaagtgaaaagttgcttttcagatcttcattccatttcacatcgtaaataccgccgccggtgccgccgaggaataccacatcgctatccaaccagtgaatatcaaagttatcccgatcgaaacgtttaccggcccacagagtactgtccttgaatatgcctgtgaaagtcggcagagagcctaattccacgaaagcctgacgcacattgagtttgctgttattgccggtccaatcgttatagtcgcgctgaccgtctgccagcatcgctttaaagcgagtcgttgcgccgtttgacagagtctgttttttctccagactcagctcaacgtaagtatcgggttcgttgcccaaacgcccaatattgccgccggtactgcctgctggcgtaacgtccgggccgccttgggtacgggcaccattactattcatcagcagcccggaacgggcatagccgtggaactcaaagccactttctgctggcgttttgctttccagcttctcagtgcgcttagccacttctactgttttttcttccgcctgcgcggtgcgtgcttctaattttttcgcctgtttttctgcaatttctgctcgtgcttcagcctgttgcgcccggcgctctgcctggtgtaagcgttgttccaacgcatttaagcgcgcttcaatgtcactggtggaagctgccgtaacgctggtggccgagcatgagagaataagtccaatagttacagcgagatagctaggttttatcatcatttttatatcactcgatatgtgattcgttgttatttgctaaacagctaaaccggtttttcatggctaacataatggagttaaccctgagttagcaaaacattttgctaacccgtttcagccattgtgatccagcttacaaatcgatcgtttcaaacggagctggccgggtttttagccataaaaaagcgcgccgggatcggcgcgctggagaagtcactcaatgagaggggggttaaagcgaggtcattacctgaataccgcagactcctgtggtgctgaatgttcggtttcatcggcggcgacccatttataaatatcaccgcgctttttgctggcatatttgatttttacccaagttttatcggtgttttccagaacggttaaatccacgatcgcgacttgatcgcctttcaccagatacatcgctgatttctgagctttgttcggtgcattatacagacgtaacttttcatttttcactgtataaacatagggttcaccttcaatcccaatagcctgttggctgattttcttaccttgaggatcgtagtatcgttcgaaaaaagcgaaggttgaaatgtcgtgatcgggagcaacgcccatgtttaattccatatccgaggccagataaagcttcccttgatcatcgtatttaaatttgtcgctataccagactgggccgccacggcaggatgaaatgatggttttgtttttctcatccagcgtcacatcggaaaactggccgcaggcgccaggattattcggttttagtgctttaaattggcctgcttcaggctgccagaggtagatgaaagtctcaaaattcaccatgccgaccggcacatcgatggcgatatcgttataaccatcgaagttgaaatcagtgaaactggctcccggatttttaccatcatcaataaattcaaaaccgcccagttcctgagtttttccggagggtaacagcacctcgaaacgcccgccgtcgctatttgatccttcaaactgctcaatagttaattgccctttatggtctttatcaataacaaaaggtgttggtgtagcaaaagctgccacgggtaagacgctgagcagcaagaccgcagacaaagatttcacgttgagttcctttcagaaaagaaaatagcgggcaggtaggttcagacaggaaatatatagtggggttggaggaaaggcaaataagcggttactgccgaataactacgataaaacagagagatccggcaggtatcagcgggctaaaccggggtttttaaaaaatgagccagttggctggagcttggcaacgcggtcatcgcgcctttggccgtggtcgccagtgcgccgcaggcttgagcctgagcgattgcagcgggaagatctgtgcctttggcccagtcttgctggtcagccagggcggccagcagcccggcgacgaaggcatctcctgcgccagtagtatctaccggagtgactttgcggctcggatattgctgcaaatccgtgcgattatgcagccatacgccatcagcccccagcgtaaccaacagcagtttgcacgggaagtgtgccattatttgctctatagctagggtggtttcatcggttccgctgataaatgccagttcttccagcgacagtttgactacgtccgccaattgtagcgcctgatgcaggcacggcagcaattcctccggattttgccaaatatcttcccgaatattaggatcgaagctgacccaaccgccggcggctttgatacgcttcatcgcttcaaatgcggtgcttcgactgggttcacggctgagcgcaatggagcaaacgtgaagccactgatgggcttcaaattccggtaaatcatcgggttgtaggaataaatcggcgcttggattgaccataaaagtaaaggatcgctcgccgtttcgatctaaatccaccaccacggttgaggtgtgatagtgaggatcttgcgtcatgtagcgggtatcgacattttcctgctgcaatatctgctgcataaagcggccaaagctatcgttgcccactcggccaataaaggcgcttttaccgcctaaacgggcaattcccacggcgacgtttgccggtgctccgccgggacatttaaggtaactatttgaattatcaggcaccagatcaaccacggcatcgcctaaaacccacactgaattcttcatgatgatcctcaaatttatccgatcctattggtggctaaaattagaagaatcggtttagcaaagcaacaaaattcctgaagtaatcagaaaaagtgagtcataacgtgatctaatcgattttattgcagtgagaaatattgggtagtttaaaaacaaaagatatggattatcattagcgttcgaatcttattatgcatttatcaaggatatatcatgtccgttagtcttctccgcgcagcccgctggctattggcttcgctggcgatccttatgtcctggtctgcgttggctgcacctattgtggttaccgatgtggcggggcgtgaagtgacattgcctcagcccgccgccaaagtcatgttggctgacgccagagccttgctggcgctgaatattttgcatccgcaaacgccgctaaaaaatattattgcttgggataattcgctaaaagtcaaagcgccagatctggtagaggcttacgcgaagacattccctgaaatcaataagattcctatttttgaaaacccctacgtttctgattttagcgtggaacaagcggtagttttcaggccagatctaataatttttgatattggcttgctggaaaaactgaaaagcagcggcgtgttagggcagttggaaaaagccggactgccggtattaatcatcgatttccgtcagcagccgctcaccaatacggtgccaagtatgagattactcggcaaagtctttggcgaagaggcgaacgctgaatcctttattcagttctatcagcaacgtttggatttggttcgtgagcgggttgcggccttaaaaccagagcagcgccccagcgtgtttatcgaacgcagcgccggaatgaaaggcgatgattgttgcagcacttttgggaaaggcagtttcggacaatttatcgatgttgcaggcggtaataacgttggaagcaagctgtttccggcaatgggcggagacgttaacgtcgagcaactgattgccagtaacccggatttttatctgatgaccggcgctgactggagtcgcgggcaccgaggtactttagcggttccgctaggttatagcaccgatgaagctaccacgcaggcgcgtctgaaacacctgatgaatcgcaccggcatcagcgtgctgcaatcggtcaaagataagaaggttatggcgatttatcatcagttttacgatacgccgttcaacgtgattgccgttgaagccattgctaaattcctgcatccggagctatttagcgatcttgaccctctggcagatatcaagatgttgcatcaaaaatacaccgcgctggattacagcggcgtgttttgggttcaggctaaataattcctgccacgctcatttctcctgctaatcctccccttacgggaggatatttctgagcctgttctattgaggcaatattatttgccattttgaatattcgctctgctcaaatggcttgtgcgcgtcatgtttgtttgtggttttctacgtaaacctttgccggccaagacttcgactgaaataaactctgattcgatttattgccaatatcgatttacttggtaagcagaatcattaagattagcgtttctaaaaaatacattcatatacatttcctttcggaataaacctcatatgtttacttttactcgtctttccttgctagctgcatccattgcgctggcattgcctacctacgccgcggataaaaaaactcaggctgatgataaccagccaacggccactcaggatgcacccgccacgggtaaaagcgacacgctttcggtagtgggaaactggttggataacaccgataacagtacggttgtgctgaatcatccgggggcgcgaaccatcgtcacccagcagcgtttgcaggaaaaaggtgcgcagactatcggtgattcactgcgcggtattcctggtgttcaggtgcgcgaaagcaacggtactggcggtagcgatatttctcttaacgttggcgttcgtggtttaacttcgcgtttgtcaccgcgttccaccattttgcaggatggcattccgctggcggtggctccttacggacagccacagctctctatggcgccgttatccatcggaaatctacagtctatcgacgtgattcgcggcggcggtgcggtacgttatgggccgcagaacgtcggtggaattattaacttcaataccaaagcgattcctaaagagtttagcggcgcggtgagcgcgcagactcagggcgctagccacggcggcctgaaaaccctatccagcgcttctttaggcgggacggcggataacggcttcggcgcggcgttgatgtactctggtttacacggccaggggtatcgcgatagtaacgacaataccgacatcgacgattttctgctgaaaactcgttatgaaatcacgcctaatgatgagctgttggccaacttccattattacgaagcccacgccggtatgccaggcggcctgaccagtgcgcaatatgcgcaaaaccccttccagtcgactcgaccattcgatcagttcgatggccgtcgccgcgatatgtctttcaaatataagcatcaggaagaagataagcagtttgaattactgacttatttcaccaaaagcttccgcggtagcaatattgaatctgaaggcactggcaataatgtgggtaaaaaacggatggttgcctatccgcgcaattacaccacttgggccattgagccgagttattcccaattattccatttaggcagcacttcccatgaggtgacggtaggctatcgttatctgaatgaaaccatggacgagaaagcatatcgttctgtctggtatgcaccgagttcagcgtcttctacaccggcgacgccggattactaccaacacacctctggcggcactgaagcccacgcggtgtatatcgatgatgcggtaaacgttggcaactggacaatcactccgggcctgcgttatgaaaaaatcagcactaacgtcgatgattctttctcacaaacttctcgtgagaagcattacagcgagccactgccatccctgaacctgatgtatcatctgtctgatgaatggaagctgtttgctaacgcgaatacctcttttggcagtatgcagtacttccaactgagcaaaggtggcaacggtaacgcgcccgcgccgggtctgaccgcagagaaggcgcatacctacgagattggtactcgcttcgacgacacacttctcaccggagaagtgacgctgttctacattgatttcgataaccaactgcaatacatcagcaacgatatcggctggaccaatctgggcgcgaccaaacatcaagggattgaaatggcgttcagttacgatttgagtgaattgaacccgacgctggacggtgtgagcgtttataccagctatacctacaccaaagcgacgaccgaaggcggcgcgtttgcgggtaaagatctaccgttctattcccgccaggtatataccgttggaacccgttaccagaccggaaactggacttggaatctggatagctatgcgcaatctaaacagcgttcaccggggagcggcccgatttatattaccgaagaaagcgccgacggccagtttggtaatattccgggttatatggtgtggaatactcgcgccgaatataatttcgggccacagtggtcaaatctgacgttaggcgctggggtaaaaaacctatttgaccaacgttatttcactcgttcaaatgataacaattccggcaaatatgtcggcgagccgcgcaccttcttcgtgcaaggttctgtagcattctaaagccgttcacccggccaaatactggccgggtttctgatagtgtttcgagcaatttttcctgctccgcaatttcctttcgctatttcgtgcagccatcctttcaaaaaaattatgcctgaaacagcagaaataacattctataaaaatagttactaaactaaattagccgcgtttagatagtcaaaatatacctcgagcgcgataagttacgtgaattattttcacaataaaccgactgattcattccaataaactcaacgcatttttaatgtacttatttaatggtttgtatgactaaataaattttttatcccgtttggcgtggtgaaatccaatgtctgcggggagcgctctggtatttaactggcagggcaaatacatcgccccacaggaaagagatagtctggctgacaaccgatatttagtggacggattccgcggtagcgagcgtatcgctggcgaaagcgactttattgcgaccgtttttcttggcttgatacagtgcttcatccgcggctttcagcgaagctggcaaatccaagggttgcagcggtgaaatgccggcgctgagcgtgaccgtagtggatactttatgattgaaaacgtggggaatatccagccctagtacgcgctggcgaacgcgctccgccagctgtgaggcgtattcttcgctaacgtgggtcagcaataccagaaactcttctccaccgaagcgcaccacgatatctcgtgaacgcacagcatcgcgaatggctgcagcaacccgcaccaaagcctgatcgcccatggtatgaccgtagttgtcgttataggccttgaaatggtcaatatccagcaacaaaacataatgattacccggcgactgcgttagcaggctttccagcttactttccaggccgcgtcggttataaagattagttaatgggtctatcatgcttaaatcactgaatttttctcgttcattatataaatgggcgaccaattttcgggtgaattcatcgctgcggcgcagcataagatgatgtaagcaaaaaccaatgagtggcagcataacagtgaatataatgcggaaaatattctggaaatcgtccagaaaaatcacggcaatcgccgctggcgctgaatgtaaacaaaaggcgataaagttatcggaaagcgcgatagtgctgataaagaaaattgtaaacaggctgatcaataagaagttattttcgtctcgccccaaatattcatattttagaatgatttgccatgtccacagaataccgagaataaatgcgaatatattcagtttattcgcataatccttcgaaaaaaatatgttaaataacaatgcactaatgctgagaatagcaatcaataccaccggcaaagtaaatgctggagtgtagtgagccggtaataacatattaaaaatagatgaagacgcatttaaaaataaaaagagcagtaaagagagccgatgcttacttttcaatagctgatcgtaggaatggccgttcatattaaattcactctgtgtatgtaatgctgtccgcagacaaataaacaatatcctcatgccgcctgatttaaggggcacgataaatagtttttctttgaaattattctgatttaaatctttttaagatttttcttaatacaaaattaccatctttggatcggcatgtcatcatgatgtcgagctgctacgcaaaatgatgcacttaactacagagtgttatatgatattggttatcattatcacttagtgtgggggtattatcatgattggagcgacaatagcagcctgccggtcgtggaggctgaacgatttcttactgagtcgaatggccagcggatggggtgttttactgccttgtgcgcttttacctttgctgggttggggggattttagcgtgaccgaactgcgtggcattattgtcgccgcgatgttggcaacgttgagtatgctgtaccacccgcgcctgcgccattttctgttgattccttcctgcctggcaatggctggcggtctactcgcagttttgacacatctatgaatacgggctgaatgacggcgtatttagggcaaaatagggaagtttttttgggaagataaccaagtgctttcgagcgagtaccgctaagtgagctatagccacatgctatatcacttgcacataccaagaagggagaaaaccgaggaattcaatcagtgtggtgcgaagggagggacttgaaccctcacgtccgtaagaacactaacacctgaagctagcgcgtctaccaattccgccaccatcgcacatctgattgtttttactgctttaatttatgtcaccagcttggtgcgaagggagggacttgaaccctcacgtccgtaagaacactaacacctgaagctagcgcgtctaccaattccgccaccatcgcatgatgctgtgtaacataaatcttgtgattgtttggtgcgaagggagggacttgaaccctcacgtccgtaagaacactaacacctgaagctagcgcgtctaccaattccgccaccatcgcgtaccatgttcatcacttttgtgatgcaaccacgggggcgaattctagagattttcctgttcaggtcaatacttatttccctttatcgggacggttgctgtaaaaaacagcatatccgcagttattcggctgattcattgagatatcgggcttttcagcgctatttttcgtcagcattactgatgagttcatcggaaattaaaagctttctcatcaataagaagcctgaaatatgtgagagagttcgggttgaaaggcgggcaaagtacggaataagtgagtaaacggtgtttacgccatgcggcagcggctatgcgctgcaacatgacgtgctgatcttgaaaatttcaacgttagcgtattcaaacgccaaattattacagtatcagattattaacgtttggcttttgcgcggggagcgcggccaacggtcgcctgataaaccttaaaacgaccattttgtgccagtacttcatggctgccaaacgcggcatccagcagcgccggataaggcaggaaagagttagccacaatgcgcagcttgccaccaacgtgcaaatgaccggttgcaccacgaatgagcatttctgccgcgtggaaactggtttgtaacccatcatggaacggcgggttggaaatgatcatatcgaaacgcccctgaatgtcagagtaaacgttactcgcgatcacttcagcttcgatttcgttggcagccaaggttgcccggctggcttcaatggccgctgcgctaacgtcgctcagagtccatttaatcttcggtgactgtttggataataccgaagccaatacgcctgcaccgcagccgacgtccagcacgcgacctttaaaaggttcgttgaaggtggagagcagcaggtagctgccggaatccagcgcgtctttactgaacacgcccggcagggttttgatggtgacatcatcaacctgatagctatgccaccagccttccggatcaaattcaggctgtttatctaaacgcgcatggtacaaaccgcagcggcgcgcgctgtcgattttggtcaacgtggcaaaatcactcagcatttcttctgcgctacgtacgccacagcggttttcaccgacgataaaaatatcggtgccgattggcagcatagacagcagattagccagttggaactgagcttcttgcttgctttttggccagtagtaaatcagcgtatcactttgcgccagaaaatcggcgtcagccagcagaccgaattgaacattgtcttccagcgtattgctcagtaattgccagtggtgatattggttagtgtgaacacgcacctcggcggcttcgaactgcgccggtaacgcgtcctgtaggtcgcctgcaaaaatcacgcggcgttgaataaactcatcactatggcgcagcatcacttcactggctggggttaatgcggacatcagtcgttggctccttaataatatgatcggggattatagaggtttgttggcgcatattcgatgtgtttgctagcatagcgccgaaacacgggtatcttgacaggaaatagcatggcatcaagacgagactggctattgcagcagcttggcattacgcagtggacgctacgccgtcccgccgtgttgcaaggcgaaattgcagtaagtttacccgaggatattcgcctgcttattgtggcggaaacgctccccggtcaggacgatcctttgctgtgtgatatcgtgcgcagccttggcctgagtgccgctcagatatatagcctgacgccggatcaggtggcgatgctgccggaagatacgcagtgtaatagttggcgattgggtatcagcgagccgcttgcgctggccggtgcacaattacacagcccggcgttgaccgagctttatcaagatgcgggcgcgaagcgcgcactttggcagcagatttgtcaccatgaagcagatttctatcctgacgccagccgatctggccaccgcgtatcagattgagcaagccagccacgaatttccgtggacggaaaaaaccctgttcagtaatcagggcgaacgttatctcaactataagctgacggtcgatcagcaaatggccggtttcgcgattacgcaaattgtattggacgaagccacgctgtttaatatcgccattgatccgcagcatcagcgccaaggctacggccgcttactgcttgaacatttgattgaacagttggagacgcgtgatgtagtcacactttggctggaggtaagagcctcaaacgcccgcgccatcgcgctgtatgacagccttggctttaatgaagtatcggtgcggcgtaactactatcccagcgcgaatgggcgcgaagatgccattatgatggcgttacctttggcttaaagccggtttcgctgtcgcaggtattttcatcgattgtctatcccggttaaatcagggaaaatatcgcgctataacactgattctcgctttcctgaatcatgcatgactccgagtgatgccagagcagggcggcccaaagtagaaatatctaactatgtctccaagtgaatatgcacaagaagtggcgaaaagacgtactttcgccattatttcccaccctgatgccggtaaaaccaccatcactgaaaaagtgttgctgttcggacaggctatccaaaccgccggtacggtaaaaggccgtggctccaataaccacgccaaatccgactggatggaaatggagaaacagcgcggtatctccatcaccacctcggtgatgcagttcccgtataaggaatgcctggtaaacctgctggacaccccggggcatgaagacttctccgaagatacttaccgtactctaaccgccgtcgactgctgtttgatggttattgatgcggcaaaaggggtagaagatcgtacccgtaagctgatggaagtgacccgcctgcgcgatacgccgattctgacctttatgaacaaattggatcgtgatattcgtgatccgatggaagtgctggatgaagtggaacgcgaactgaaaattgcctgttctccaatcacttggccaattggctgcggtaagttgtttaaaggggtttaccacctctataaagatgaaacttatctgtaccagaccggtaaaggccacaccattcaggaagtccggattgttaaaggcctgaataacccagagctggacgttgctgtaggtgaagatctggccaaacagttccgtcaggagctggaactggtgcagggcgcttcccatgagttcgatcatgaggctttcctgaccggtgatttaacgccggtcttcttcggtaccgcattaggtaactttggcgtggatcacatgctggacggcctggtttcctgggctccggcaccgatgccgcgtaaaaccgacgtgcgtgaagtggtggcgtcagaagagaaattcaccggtttcgtatttaaaattcaggccaatatggacccgaaacaccgtgaccgcgtggcctttatgcgtgtagtttccggccgatacgtaaaaggtatgaaactgcgtcaggttcgtaccaagaaagacgttgtgatttctgatgcgttgacttttatggccggcgaccgttcccatgtggaggaggcttttgctggagatatcatcggcttgcacaaccacggaaccattcagattggtgataccttcactcaaggtgaagatatgaagttcaccggtatcccgaactttgcgccagagctattccgtcgtattcgtctgcgcgatccgctgaagcagaaacaattgttgaaaggtctggttcagctgtcagaagaaggtgcggtacaggtattccgcccaatctccaacaacgacctgatcgtcggtgcggtaggggtgctacagtttgaggtggtatcttcccggctgaaaagtgaatacaacgttgaagcagtatacgaatcggtcaatgtttccaccgcccgttgggttgagtgcaacgacgtgaagaaattcgaagagttcaaacgtaagaatgagctgaatctggcgctggatggtggcgataatctgagctatatcgctccaaccatggtcaacctgaatattactcaagagcgttatccggacgttattttccgtaaaactcgcgagcattaatctcagctgtatcccttataattcggggcatccactgccccgaatctttagttttcctcatcatttatacctctaagattcatcctactaatcttccgatgttgcccctttaggcggattcctactgtctttttttatctgtggtctatatttataagcgtgttaggcaatcgttcagataaaaacagtattctgaatcaatcagttaagcttttgtttgttcattgccaaacgacaggtttaattctgttaaatcagtcagtaagcgaaaatgtgctctggattaagcgttattgtcagttgtagcaggcagttttgcttcagtttgttaatccggactttgtttatggctgaatttaatggtgttttaggcaggcatcgcaattgtggattgcaattgcagtatgtctgaccgagcaagctcaatttttgcccgtttggaaatattgaagctacagtaattgtgaagtatccattgagtgagccacgaaaacggtggcgaaacaactgacactgactggcttcacaccaaaaaggaaaaatcgatgaaaaacactacatttgcacgttcagtgatggctgttgttttaggttctgcgttggttagcggaagcgtaatggctgaagacactttactcaataaagcatccagcacgatagacagcaccggtgcgaaaatcgatagctccatgaaaaaagttgataattacatggatgagagcgcaactacggctaaagttaaaagtgcattagttgaggataaaactattaagagcggcgatatctcggtgaaaactgaaaatggcgttgttgttctgagtggttttgtatccagccaggctgaagccgagcgtgcggttgctgtcgcaagcaaggtagaaggcgtgaaatctgtcagtgataagctgcatgtaaaagatcagaaaacacaatcagttggtgaatatgccggtgacgcaaccacgaccagcaaagtaaaagccaaactgttggccgatgatatcgttccatcgcgcaaaattaccgtagaaaccaccgctggtgtcgtcctattgacgggcgacgtagaaaataaagcgcaagctgagcgggctgaaagcatcgcgaaagccatcgacggtgtgaaaagtgtaaaaaacgatctgaacattaagccttaatacttccacagacggtctgtggagtagcaggccgttctgaagagcttaaaacccagagttgacccgttagtcgttgctgaagcgctctatggatggggctttttgaagctacaaataccacagtaagcgtgttgttcagcactacagcgggtcaattttattgagatacggatggaaggagagggcttatgtttcgttggggcattatttttctggtaatagcgttgattgctgcggcgctgggtttcggtgggttagccggtacggcggcctgggccgccaaagtggtattcgtcgtcggtatcatactcttcttaatcagtttgtttaccggacgtaaacgtctttagctagcgtaggaagatttttacattcttgtttttatgctggaaagccgctgtcattaacagcggctttttaatgggccaaatgaagctatttaagaaaccaccaatagcgaattaagacgacatcattagcaaaaagagtctgtttttccgatgttaatcggtgatttactgggcgtaaaactggctatcagcaatgattctttacaagaagattaacgaaagcgcgtaagacaagctattctcggggtctattgctactcactaaggatggatggtgggacacagaatacctatcacgctgggcaatattgagccattagcgtacaaaccctatcagcccgggaaaatggcgttggtatgtgaagggggcgggcagcgggggatttttaccgccggggtgctggatgaatttcagcgagcccgctttaatccattcgatttaatgataggtacttccgccggtgcgcagaatctatccgctttcatctgtgaccagccgggctatgctcgtcgggttatcacgcgttataccaccagtgcgaatttctttaatcctttgcgctttgttcgtggcggccacctgatcgatctcgattggctggtcaatatcacctctgagcaattgccgctagctattgatcatgcggaaaagcatttgtccaatggacgtgaattcttgatgtgcgcctgccgcagcgatgatttcacgccgacttatatcgcgcccaatagagaaaactggctgccggcgattaaagcctccagcgccattcctggattttatcgttcaggggtggaaatggatggaatcagttatctggacggtggtatcagcgatgccataccggtggaggaagctcatcgtcgcggcgcagataccattgtcgtgattcgcacagtgccttcgcaaatgtattacaccccgcagtggatgaagcgcatggagcattggtttagcgaaagcagcctgcaacaaatggtgcgaattatgcagcaacacgagcatagctatcatcgcattcaaaagtttattgaaaagccgccggggaaattacgggtgtttgaaattttcccacctaagccgctagccagtaacgctttgggcagtaaaatagcttcgctaaatcgggattatcatttgggacgccgctgtggtcgttattttttagcaaccgtgggccactggttattgcctcgagataaaaggccggatgataagagtaaggtggttttctctcgtcgtttaattaaaccccgccatgacattcagcctgaaattgtagcctcgtcattgctgactgaatcgggtcaatttgctgaaacggggaaaatcttacccgccgagaatatgccgttagcaaaggggcttattttaccggctaagcttagaaataaagtggcgcaggtgatttctgatttcactccaccggtcaaagcaaaaaaatctaaaggtgataaggcgtaatgtcaggttctaacagcagcgcagcttattttattgatactcactgtcatttcgattttccgccgtttagcggagcggaggtggctagtctgacatcggctgcgcaggcgaacgttcggcaaatcattgtacccgctgtagaagccgaatatttcgatcgcatacaggctttagctaatgattatccggcgctgtttgccgctctgggaatgcacccgctgtatatcgacaggcatcaggagccgcatctgactttactggatcagcggctgtcgcagagatcgccaaaagtggttgcagtgggcgagattgggctggatctgtatatggaaaatccgcagttctctcgccaattggcgttattacaagcgcagcttaaattagctaaacggtatgatttaccagtgattttgcattctcgccgcactcacgatcaactggccgcggcgctgcgtaaagccgatctgccgcgcaccggtgtagtacatggttttgccggcagtctggtacaagcgcaggcgtttattaaattaggctattacatcggcgtgggtggcactattagctatgagcgagcgcagaaaaccagaaaagtgatggccgagttaccgctggaagcgctgttgctggaaaccgatgcgccggatatgccgctggccggttttcagggacaaccgaatcgccctgaacgcacggcggacgtgttcactgtgctgtgtgaattacgatccgaaccagcggatgtcattgcgcagcagctttatgccaacagtgtgcgtttgtttaatcttcctccggcgtaatacctttcatttcaccgcgcagttgtgctgactacctccattcatccccgagacttagtcggctaagctcccaaccactcactcagctgccgcgtggctgcaacgaaaaatgaacggatggctaacaacgggctgaacgtcattgaagcccctgaatgagttacttagcgtggtaacatcctaactactaataacggctataattatgtgaatctgatcacgtttccagtcatttggttgcttctttgtgtgtttatttgtgacagggattgtttgcgatttgagccatgacgctataatccccccgaattcaaaaaagaaatatgtggtctgaacgcatattaaatcgtgtcattctccatttaatacatacacagggaacatcagatgcaacccatcatgagtttggtcgggatggcggtactgatattaattgctgtcttactctcgagtaactttagggctattaatatccgcaccgtcgtaggcgcttttattatccagattggcgtcggagcattggttttgtatgtgccgatcggtcgccgtattttgggcggaatgtccgaaggcgtagcgaatgtgatcgcctatggtaacgaagggatttcatttattttcggcggactggtctccgacaagatgtttgaagttttcggcggcggtggctttgttttcgccctgcgcgttctgccggttatcgtctttttctcctcactgatcgcggtactttattacctcggaatcatgcagctggtgattcgcgtactgggtggcggcctgcaaaaactgctggggacttcccgcactgaatccctgtcggctaccgcgaatatcttcgttggtcagacagaagcgccgttggtggtacgtccgtacatctctaccatgacacaatctgagctgtttgccgtgatgtgcggtggcctggcgtcggttgcgggttcagtattggcgggttatgcgcaaatgggcgtgccgttggaatacctgattgccgcgtcctttatggccgcgccaggtggcttgctgtttgccaaattgatggtgccggaaactgaaaaaacgcacgatcacgaagatgcaaccaagctgattcctgaagccgatcgcccagcgaacgtcatcgatgcagcggcaaccggtgcggcttccggtatgcaattggcgttgaacgtgggtgcaatgctgttggcattcatcgcgttaatcgctttgttgaacggcattttaggcggtattggcggctggtttgattatccgcagctctcgctggaattgattctaggctgggtattctcgccaattgctttcctgattggcgtgccgtggagcgaagcgacggtggcgggttcctttatcggtcagaagattatcgtcaatgaattcgtggcctttatgaacttcggtcagtatttgaaagccgatgagttggttattgccgctggtttgccagtactttccgatcataccaaagccattatttcttttgctctgtgcggttttgccaacctttcatccgtggcaattctgttgggcggtctgggcagcatggcgccgaatcgccgtcatgacattgctcgtttcggtttgaaagcggtggcagcagggactttatctaatctgatgagcgccaccattgccggtttcttcctggctctgtaattcatatcgatttgtaaaatataatattctgcaaaggtagattgtttgtagaatagcgtgctggcggggacggttatcacccgccagcctgtttttcccttccggtgactcaggccgtttgtgcgtattgtcatcaccgtcgtcgcacggaattagatgaataggctattcttgatgcgagagcgaaagatagtctgcacttatcgataaatcaggttattttgtgactcaattcacatataattcagacctgttacaaataactattaattaatgtgagtattaacacatctcatttgagcgcttcatgctcaaatagagacagctggcttttcttgtggaaaagctaagtgcggtgagatggatctcagttgccgctgcgggagcaaatcccaagggcgctatcttcaaggaaccaagtccgctcgccaacgtgttgagctgcatggcctggaatttccataggaaattgccgtcagttcataaatgaatgctcggttttggcgcggtgccgaagctgaaatagagttggagagttttatgaccgatttaaccgccagcgcgaaacgtgcgctcagtttgatggatttgaccactctgaatgacgacgataccgatcaaaaggttatcgatctttgtcatcaggcaaaaacccctgcgggtcatactgcggctgtctgcatttatcctcgttttattccgattgctcgtaaaacgctacgggaacagggtacccctgagatccgtattgccacagtgaccaatttcccgcatggcaatgacgatatcgacattgctttgaccgagacccgcgcggctattgcctacggcgccgatgaagtagacgtggtgttcccatatcgcgcgctgatggctggtaacgataaagtgggcttcgagctggtaaaagtgtgcaaagaggcctgtgccgccgccaacgtattgctgaaagtcatcatcgaaaccggtgaattgaaacagcaacatttgatccgtcaggcttctgaaattgcgattaaagcgggcgctgatttcattaaaacctcaaccgggaaagtaccggtgaacgcgacgctggaaagtgcggaaatcatgattcgcaccattcacgatttgggcgtaggcaaagaagtcggcttcaaacctgctggcggtgtgcgtactgcagaagacgcggctgcattcctgaaactggcggacggtatcatgggcgaaggttgggcggatgcgcgccatttccgcttcggtgcatccagcctgttagccagcttgctgaccactttaggtcatcacagcacagccaaacccggcggttattaattattgcagatgcacgacgggcactgcgcccgccgtgttgctattgctgaaaaggcacaatgcgcttttcgatttcccattcaggtcaagcagggggatgccttgtttctggcacaagaaattattcgtaaaaaacgcgacggtctgccgttgagcgaagaagaaattcgtttcttcatcaatggtattcgcgacaatgttgtttccgaagggcagatcgccgctttggcgatgaccatttattttcatgatatgagcatgcctgaacgcgtggcgctgactatggcaatgcgcgattccggtaccgtgctggactggaaaagtctcaagctgaatggccctattgtggataagcattctaccggtggcgttggcgatgtgacttcgttaatgctcggcccaatggtagcggcttgcggcggttatgttcctatgatttcaggccgtggcctgggccataccggcggtacactggataagctggaggccattcctggctttgatattttcccggatgataatactttccgtaagattattcaggatgttggcgtcgcaatcatcggccagaccagttcattggctccggcggataaacgtttttacgccactcgcgatattactgcgaccgtggattccattccgctgattaccgcttctattctggcgaagaaactggcggaaggcctggatgcgctggtgatggacgttaaagtcggttctggtgcctttatgccaacctatcaactgtccgcagatttggcgcaggcgattgtcggcgttgccaacggcgcgggttgtaaaacaacggctctgctgactgatatgaatcaggtgctggcatccagcgccggtaacggtgtggaagttcgtgaagccgtacgcttcctgaccggtgaatatcgcaatccgcgcttgctggaagtgacgatggcgctgtgcgtcgaaatgttgctttccggcgggttggcgaactccgaaaccgatgcgcgcgctaagctacaggcggtattggataacggtaaagcggcagaagtctttggtcgcatgattgcggctcagaaaggcccgactgatttcgttgaacgttacgacagctatttgccggtggcgatgctgagcaaaccggtctttgcagaaaaaccgggcattatcaccgcgatggatacccgcgcgctggggatgtctgtggtagcgctgggcggcggtcgtcgccgtgctaccgattcaatcgactacagcgttggcctgaccgatatggcgcgtctgggcgataaaatggatagcgaacgtccgttggcagtgattcatgccaacaatgaaagtgactggcagcaggcggctgatgcagtacgcgcggccatgacgctgggtgacaaagcgttagaacaaacgccggtggtttatcgtcggattaccgaataagctttctttattcactacgaatttggcgcagtaaggcatgttggccgtactgctcccacagcgtgagttcacgcaggagaaaatgatgaaacgtacatttattatggtattagactcatttggtatcggtgctagcgctgatgctggcaagtttaacgatgaaggtgccaacaccctcggccacatcgctgaagcctgtgcccgcggtgatgctgatattggacgtaaaggcccgctgacgttgccgaacctgagccgtttagggctgggtaaagccgctgaagaatcctgcggtactttccctgtgggtctggataaagatgctgacatcattggtgcctatgcttacgccagcgaattatcttccggtaaagacactccgtcaggccattgggaaattgcaggtgtgccagttctgtttgattggggctatttcagcgacgttgagaacagtttcccgcaggaattgctggataaactggttaagcgcgccaacctgccgggctacctaggcaactgccattcatccggtactgtaattttggatcagttgggcgaagaacatatgaaaaccggcaagccgattttctatacctctgctgactcggttttccagattgcttgccacgaagaaactttcggactggatcgtctgtatgagctgtgtgaaatcgctcgcgaagagttaaccgaaggcggctacaacattggtcgcgttatcgctcgtccgtttatcggcgacaaaccgggtaacttccagcgtactggtaaccgccacgatctggccgttgaaccgccagcgccaaccattttgaaaaagctggttgatgagaaacagggtgaggtggtttctatcggcaaaatcgccgatatctacgcacacgtgggcatcactcacaaagtcaaagctaccggtattgatgctttgttcgacgctactttggaagaaatgaagaaagcgggcgataacgccatcgtctttaccaacttcgtggatttcgactcttcttacggccaccgccgcgatgtggcaggttatgccgccgcgctggaactgttcgatcgccgcttgccagaattgctggaattggtgaaagatgacgacattatcatcttcaccgctgaccacggttgcgatccaacctggccgggtaccgatcacacccgtgagcacattccagtgctggtttacggtcccaaagtgaaaccgggttctctcggtcatcgcgatactttcgctgacatcggccagaccgtcgcgaaatattttgatttgtcaccgatggattacggcaaaccaatgttttgattatctgcgtcggaccgtttatggcggtcgaccggtgattttatttaatatttttgatttataaggaaaataattatggctacgccacatatcaatgctgaaatgggtgattttgctgacgttgtcctgatgccaggggacccgctgcgagcaaaattcatcgcagaaaccttcctgcaagacgtgcgtcaggttaacaatgtgcgtggcatgctggggttcaccggtacttataaaggccgcaaaatctcggtaatgggtcacggtatgggtattccatcctgctcaatctacgcgaaagaactgatcaccgatttcggcgtgaaaaaaatcattcgcgtgggttcatgtggcgcagttcgtaacgatgtaaaactgcgtgacgttgtgattggtatgggtgcctgcaccgattccaaagttaaccgtctgcgttttaaagatcacgattatgcggctatcgctgatttcgatatggtgcgtaacgctgttgacgccgctaaagccaaaggcgttccagcacgcgtcggtaatattttctccgctgatttattctatacgccagacccacaaatgtttgatgtaatggaaaaatacggcattttgggcgtggaaatggaagctgccggtatctacggcgtagcggcagaatttggtgctaaagcgctgactatctgtaccgtttctgaccatatccgtaccggtgaacaaactaccgcagaagaacgccaaacgaccttcaacgacatgattgaaatcgcgttggaatctgttctgctgggcgataaagagtaatagcccgggctacaatttcttctgagccgcacactccgctgcggctctttttttatcaatactttctgtttctctgtttctttctatatgcgtcaacaggttccagatatcacccctgaacattggctacaagcgcagcgtttggttgagatattttggcttcgagtggctgatcattcagctatctgtttggaattcagtgcgatagcattgccaaatgcaggaaaagttggctcactcacgccacgtatccaacgcatggcctgaacctactttttgacctgcgattcctcggttctttccgtagatttgctggcagttgaatccgcattggatgattcccctgattcgctgtcttcttctaccggcgtattggcagtgagcagataaggcgattgctgccagcggctacggcgatgctgcaataaggttctggccagaataataccgaccgccagcgcgaccagaatcattaaacgcagtaagttggtggtgttatccacctgcttggattcggttgccagtacgtgggtatccaacgtcatgcgcaaaaagccgctaggcccgttcttgccgggaatcatctccacaatctgatgattgaaataactgccggggcgtttgccgtccagcgccaaccggtcacgcactttgactttttcgccagaatccgcgaccaaagtgccgtcaatcaaatacacactggcatccagtatgcgactcgcctgcgtcaactgtttcaggacttcatcgaccttctggctatccacgtcgtcattgttgctatccataatcggagacaggctaaaagccacctgtttcgccagcgttttcgccagctcttccacctgttcggagcgtgccaactggtggctgaggctgaaataggatgcgccctgcataagcagcacaagcaaagctagacaaatcagtacgatagcagtgcgatgcagtcgaaattttaatttagcccgggccatgcaggttccttacgcgttttgatgactttatgttgccagaagcaaggacgataggatagcttgatgcatcgtttttacccttcatctttctcgctgctgcggtgttggctgcttttgctcaccccagtcgcttagtgggctaagctcctgaggattcgctcagtcgctgcttggccgcaacgagaaattattgggcttatatcgcagctttgctgtgatgtgaggctattgggtatatattgccgattctgggtttctacaggagcttttcatgtcaaatagtctgacctattgcgatctccccgcggagatttatcagtggcccggtttgccgctttctttgagtggtgacgaggttatgccgctggattatcgtgcgggccatacgggttggctgttgtacggcagaaagctggataaacaacgtattaccgattttcaacgccgtttgggcgcggcgatggtgattgtctccgcttggtgcgtcgatgactatcaggtgattcgtctggctggtagcctgacaccgcggattaaaacgctggcggacgaaagcgggctcgatgtggctccgctaggcgcaattcctcatttgcgtacgccgggtttattggttatggatatggattccacggctattcagatcgaatgtattgatgaaatagccaaattagccggcgtgggcgacgaagtggccgctgtaaccgagcgggcaatgcaaggggaactcgatttctctgccagcctgcgtcagcgggtaggtacgctgaaaggagccgatgccaatattctgaaacaggtacgcgatactttgccgctgatgccggggttggtcacgctcgtgaagaaattacaggcgctgaactggcatgtggctatcgcttctggcgggttcacttattatgcggaatatctgcgggataagctgcatctggacgcggtagccgccaatgagctggaaatccgtgacggcaaactgaccggtcaggtgctgggcccgattgtcgatgcgcaatacaaagccgacacactgattaaactggcggaaaaactgtctattccgattcagcaaaccattgccatcggcgacggtgccaacgatctgaaaatgatgcaggcagccggtttggggttggcgttccatgctaagcctaaggtttatgctaaagcgaaagtggcgattcggcacggtgatttgatgagcgtgctgtgtattttaagcggcagtctgaagcacgaagaacgctaattccctacgtttctggcgtgctcgctcagtttgccgtcacgccagtaaaccgtaggaaaataggcggttacaacgctaaaacctattgaattttaaatttattgttagatcgtaatacagaggaaaagacgtggctaaagcaccaaaacgcgcatttgtttgtaatgagtgcggcgcagattatccgcgctggcaggggcagtgcagtgcctgtaacgcctggaataccattaccgaagtgcgtctggctgcggcaacgccttcttcgcgtaacgatcgcctcggtggctatgcgggcgaggcgggtatcagtcgggtacaaaagctgtcagatatcagtctggaagcgctgccgcgtttcaccaccggcttccttgagttcgatcgggtgttaggcggcggcgtggtacccggcagtgccattctgattggtggcaaccccggcgcggggaaaagtaccctgctgttacaggtattgtgcaagctatctgaaggcatgaaaaccctgtatgtcaccggtgaggaatcgctacagcaggtggcgatgcgagcgcatcgactcggtttgcccaccggtaatctgaatatgttatcggaaactagcatcgagcagatttgcctgattgcagagcaagaacagcctaagctgatggtgatcgactccattcaggtgatgcatatggccgatattcagtcctctcccggcagcgtggcgcaggtgcgtgaaaccgccgcttatctaacacgttttgctaaaacacgcggcgtagcgatagtgatggttggtcacgtgactaaagacggctcgctggccggtccgaaagtgttggaacactgtatcgactgttcagtgatgttggatggcgacggcgattcccgcttccgtactcttcgcagccataaaaaccgctttggtgcggtgaatgagttgggcgtttttgccatgacggaacaagggctacgtgaagtcagtaatccatcggcaattttcctcagccggggtgatgaagtcactgccggtagctcggtgatggtggtgtgggaagggacacgtccgctgttggttgagattcaggcgctggtggatcattcgatgatgtcgaatccgcggcgagtagcagtaggattggaacagaatcgactggctatcttgctggcggttttacaccgtcacggcggcctgcaaatgtcggatcaggatgttttcgttaacgtggtcggtggggtaaaagttacggaaaccagcgccgatttggcgttattaatgtcattggtatccagcttgcgggatcggcccttaccgcaggatttagtggtatttggcgaagtcgggctggccggtgagattcgcccggtgcccagtggccaggagcgaatttccgaggcggcgaagcacggttttaagcgagccatagtgccgcacgccaacatgccgaagaagcctctgccgaatatgcaggtatttggcgtgaaaaaactggccgacgcgctggcggttctagaggatctttaagctgcatttagtcgtgttgtttgagcagcatactgtgttatttttgtttagcgtgctaaacaggaggcagtatgctgcagttcgattatttaaaaacggcaatcaaacagaaaggctgcacgttacagcaagtggccgaagccagtggcatgaccaaaggatatttaagccagctacttaacgataaaatcaaaagccccagtgcgcaaaaacttgaagccctgcatcgttttcttgggttggaattccctcgccgcgagaaaaaggtcggcgtagtgtttggtaaattttacccgctgcataccggccacatctatttgatccaacgagcctgtagccaggtagatgaactacatatcattctgtgccacgacgaacctcgggatcgggaactgttcgagaacagctccatgtcacaacagccaacggttagtgaccgtttgcgctggctgctgcaaacgttcaaatatcaaaaaaatatccgcattcactcatttgatgagcacggcatcgaaccctatccgcacgggtgggatgtctggagccgcggcgtaaaggcctttatggcagaaaaaggcatagtgccaagctttatctattccagcgaaagtcaggatgcgccgcgctatcgcgaacagtttggtatcgaaaccatcctgatcgatccgcagcgttcatttatgaagatcagcggccgtcagatccgccgtgatcctttccgttactgggattatattcctaccgaagtcaaacccttctttgtccgtacggtggcgatcctcggcggggagtccagtggaaaatcgacgctggtgaataaattagccaatatattcaataccaccagcgcctgggagtacgggcgggattacgtattttcccatttgggtggcgatgagatggcgttgcaatactcagattacgacaaaatagccttggggcaggcgcagtacgtggatttcgcggtgaaatacgccaataaggttgcatttatcgatacggacttcgtcacgactcaggcattttgtaagaaatacgaagggcgggagcatcctttcgtgcaggcattgatcgatgagtatcgcttcgatctggtgattctgttggagaataatactccgtgggtggccgacggtttacgcagtctggggagtacttccgatcggaaatccttccaaagcctgctggaagatatgctgagagccaataacgttgaatatgttcacgtggaatcggcagactacgacgagcgcttcctgcgctgcgttgaattggttcagcaattgctggccgccgatccactgcgattatcccgctcaccgatcagcgagcggaacagtctgcagaatgataattaataagcgataaccagcttgccctgcatgcgtccagtcagtactttttggtgcgccgcgtgcagggtgtcagtcgtcaggccgtgtaaagtatcactcagcgtgccgcgcagttctcctgcgtcgacatattgagcgacctgtttcaatatttctccctgttgcgccatatccggcgtgttgaacatgctgcgggtaaacatcaattcccagtgcagagcggcacttttcagtttcaacgcgctttgatcgaggggatgagtattttccacgatggtgcaaatgtggcccatcggtgcgatgaggtcgccgatcgtcgcccagtgaccgtcggtgtcattcaggcagaaaatataatccaccttatcgatcccattactggccagttctccttttagatcgcgataatcgacggtgagatctgcgccgcgatccagacaccagcttgcagagactgggttcgaggctgtggcgatcacgttaacctgactacgcagcgccgccagtgagatggctatcgatcccacgccgccggcaccgccaatgatcaacagggttttccccgctggcgcttcctgaatttttagatgctcaaatagcccttcccaggcggtcaatgcggtcaacggcatggcagcggcttctgcccagttcaggcgattcggtttacgcgccacgatgcgggcatcgaccaattgatgcgtggcgttgctgccaggacgcgtcagatcaccggcataccagacttcatctccaacgctaaaaccctgtgtcgagctacctacgccaatgactacgccgctggcatcccagccgagcactcgcggctgctgtaagccatttttttgtagaccggcgtggactttggtatccaccggattaaccgatgcggctttcacttccactaagagatcgaaagcactgggcgttggctgatcccacgggatctgaatgaaatcggcgggtttctgcggattaactgcaatagcgtaatgagacatagcctagctcctttttaggtagaccttgagtttagatccgattgactagagtgataagatggacaatcaataactcagtgttcgtctatggtgaacaattatgtttaagcagctacaggatatggcgctgtttgcgcgagtggccgaatgcggcagttttaccaaggcggcggccatcgccggtttacctaaatccagcgtcagtcagcggattagcctgttggaacaccggttgggtatccggttgctgaatagaaccacgcgtcagatcagcctgacgttcgccggtgaacgctatttggttcactgtcaggaaatgctacaggcggcggagcgagccgatttaaccctacagcgcttgctggataatcccagcggccgactgcgagtttccagtccggcagggctggccgccactttgctggcgcggattgccacggattttcaacgacaatatcccgatgtttctctcgaggtattggtctccgacgttaaagtggatttggtggaagaaggcttcgatgtggcgttgcgcactggaaaaccgcaggattcttcattgattggacgccgcttgggctatgcgccccgcaatttactggcttctcctgattatctgactcaatttccgccgattttacatccgcgtcagttggaggaacatcgttggattacccaccgcgcttggccagaactggtattaaatcatcaggatgaatatttccgttggcagttacctaagctacacgtcaccgataatttgctctacgccattgagtgcacactatcggcgggtggaattaccttgctgcccgcttttcttagtcgcgaaaaggtcgcgcagggaaaattagtggaagtgttgcctgaatggctggccgaagggaatgaactgtatttggtttatcccagccggaaattaaattcaccggcattgagctgttttattgatgtggttatggggcatccggtatttacccattatgcccaaggattaacgtaatatttttggtgcgttggctaagtgagagcattactttgcggcagaagtgggaagcgcaacaatatcgttaaaatcggtcccaaaccaatagacgccataatcgctccagtgtgggccttcaataaaatccatcagcgaaacctgttcggtgtgaaaaacctgaccggcctgattttcaattttaatgtagccgctgtaatgagagccgtcgccgggcgagccaatagagggaatcaattgggtaatcttataaaagcgcataacgtattgatgattgggactccattcttccctgaccagagtgccttgttgccaccaaaaatagactgctccacccagaataaacaaaaatagcgtccatcggattttgcggattcttattaattttttcagtgcttcagagattgaatataatttcatttgctatccatgcgtcaggctaaaaaaatactgcccaccaaggtgagcagtatttagcagtgaatgacgaattacttggtcattttcttgtacttaatacggtgcggttctaaggcatcagcgcccagcgtccgctttttccactcttcgtattcagtaaagttaccttcgaagaattctactttcccttcatcctgataatcgatgatatgggtagcaatacggtcgaggaaccaacggtcatgggaaataaccatcgcacagcccgggaattccagtaaggcgttttccagtgcgcgcagggtttcaatatccaggtcgttggtgggttcatcgagcagcaacatattgccgccaacctgcaacaattttgccagatggatacgaccacgctcaccgccggacagctcgccgatgcgtttgccctgatcgacacctttgaagttaaagcgaccaacgtaggcgcggcttggcaattcaaagttaccgatcttcatgatgtcctgaccgccggaaacttcttcccacacggttttgctgttatccatgctgtcgcggaactgatcgacagaggctaactgcacggtttcacccaaggttatggtgccggaatcaggctgttcctgaccggacaacatacggaacaacgtagatttacccgcgccgttcggcccgataataccgacgatggcgcctttcggcagtgcaaaggtcagatcgtcaatcagcaggcggtcgccataggatttgctcaggttctgaacttccagcactttgtcgcctaaacgtggaccaggtggaatgaacaactcgctggtttcgttacgtttttggtattcaacgctgttaagttcttcaaagcgagccaaacgtgccttgcctttagcctgacggcctttcggattctgacgaacccattccagctctttctcgatagatttacgacgagcggcttcggaagaggcttcctgcgccagacgagcgtctttctgctccagccatgaggagtagttgccttcccacggaataccttcgccgcggtcaagttcgagaatccagccagccacgttatccaagaagtaacggtcatgggtaatcgccacaacggtgccttcatagtcgtgcaggaagcgctccagccaagccacggattcggcatccaggtggttggttggttcgtccagcagcagcatgtccggtttttccagcagcaggcggcagatcgccacgcgacgacgctcaccaccggacagattggcaattttggcatcccaaggcggcagacgcagcgcatcggcagcgcgttccaactgattatccagattatggccatcgtgagactggataatcgcttccagctcgccttgctctttcgccagcttatcgaagtcggcgtctggatcggcatacagcgcgtagacttcgtccaaacgagtcagcgcgcgtttaacttcgctaacggattcttctaccgcttcgcgtaccgtttgttccagattcagttgaggttcctgcggcaggtaaccgattttcaggcctggttgagcgcgcgcttcgccttcgatgtcggtatctacaccggccataatgcgcaacagggtagatttaccggaaccgttcagacccaatacgccgattttggcgccggggaagaagctcagggagatgtttttcaaaatatgacgcttcggcggaaccactttgccaacgcgatgcatggtatagacgtattgagccacgttgctctagcctctctatatcagtttttattaggatgtctggtgcggagtgtagcccgtttcgataacggatcccatacatccttgaagataacggagtataacctttttgcgggagaggcgggctgaccgcccccacagaatgggcttattcaggtatcagggcgcggtgacgaccattgccacgcgacggttttcggctcggcctttggccgtgcggttatcggcaaccggatttagcttaccaagcccgcgaacttcgatattggctttcggcataccgatggaagtcagggtatttgcgacggcgctggcgcggccataagacagttggttattgtaactatcttcacccattgaatcggtgtgtccgtccagacgaatatggctgataccaacgtccatcaaggcgtggccgattttctctacggtttgctctccctgagcattcagtttcccaacgttgctgctaaatagcaccttatctgacaggccaaattcccaaccgttgtccgttagtttgaatccctgttcctgtagagccgctatttgctccgctgtcagaccctgaggcttattctgacaacccgctagcagcaataaccccaacgccatcaagccaatccacaggctactcctcaacttttgcattgtaagaccttattcttttacgctgtgtatgtcaggctttggggcagaatcacccggccgcctccatgataattgttcttcgccaaatacatggcctcatccgcacgctgtaacagttctactggcgtttgcgcgtgttccggatagaacgcaataccaatactgattgatgttgtgatatccgtgccgtcaggcagtgtaattgggtgagccatacaatgaatgatattgtccgcgatcgataatacatcatagctattgccgattgacgtcagtagcacggcaaattcgtcaccgcccagacgagcaacaaaatcagtttcacgtaattgcgaacggatacgttcagccatggtgatgagtacgacgtcaccggcggcatggccataattatcattaatctctttgaaactatcggcatcgaggaacatcaatgccaccatatccttatcagcgcattcattgagcgtgcggttcaggctgacttcaaaaaaggcgcgattggcaagcccggtcaggctgtcatgagtcgctctatgggtcaggaaatcattttcctgcgttaaatgtgcctgccagacttccagctcttccagcagcccattgaaatcgttacttaactcattaagttctttgatatgagccgatggaactctttggccaaagctacgatgcaggctcacatcgtgcgccacttcggttatacggttcagcgagccgacaattctgcggagcattcggcgagaaaggaacagggcgactagcgtgctggcaatgataccggctagcatggcaatcaccccgcgcaacaggaaactgagcaggctgccgccgtggccgacaataataatggtacctatgcgttcaccgctgtgcatgataggcagttctaccgggccactcagtgcccaatgggcaacgctttgctctagctggtggaacgggccgtgggcgggtagcgaccaactggctattagcttgccattggcatcaactattttagcctcggccacctcttcgctggctgcaatcaacgccaatgattcattggcggcaatattatcgccgaaaactacggcggcttcggtggtatagctaattgaacgggcgatcaaatgcaggttgtggtcggcgtaaacacgcagggaaaaaatggcaaccagagtaataaagataccagccatccccacggcaaccagagccacggttaaatgtatgcgttgaagtattttccctaagctaggtaattttacacgacgtttatttattcttttaatcagtctcataaaccatcagccttcttacgggcgagttgcagtacgctcggatgaacacgaactcctgtacgtgctaacgcatccatattaaccttaaaagatgcctggttatcttccactaacagacaaaaggcgctgccggtggcgcattcagaataatcctcactgattgtcagtatcggatgaccttgagtgcgattaattaactccaaccgctgctctgcggtggcacttcccaaataaatagcatcgcattggcttgaaatagccgggctggcaaacgggaatcgctcgactttaattggatgttgcgttgccattaacgccgggttaaacaggccttctgcatagttggtcggggcgacaacacataacctaatgacctgcggagtcaccggccagcgggcatagctgataatccccaaaaccattttggttgcggcatctgtccgcgcctgtatcacgttcgcattggcaggttcttccgccgatctggcgccggtagaaaatacgaacgtaaatacaatcaatagatactgacaaatacgcccaaaatgccagggaggcataacgtattgatcattcttactgacgccgttgattgcgcaagtcgaggtggtcatttttgcgcttcctgtggatcggccccggaaatataaacaggcaacatagtcagtgagaaaaagtcattttattatcggcgcttagatttaccgtttttattctctctgattgtattacaagatcacattgttgcaatgctcgtcatggtatcggcagggcagggaattttcttaaatattttcatttcagggaaaaaccgcccggttttaacaccgggcggagaaagaaagcgggaaatggtcaaacagactttatggaaggtttaaaacgctggataacccatttctctatttcaacaataatgaagatggcaagacccaccagtaatgtcaggccccagtaataggctggcagaggttcggttccaaaggctgtgttcataaacggcagatagataattgccagttgcagcaagattagaacgccggaaaccagccacagacctttgttaacgaacaactctttgttcagcgggaagcgatccgccacgcggcagttaaacatgtaaatccactgcgcggtaaccagcgtttgcatgagcactgtacggataaattcggtgctgtaacctcgaggttccagataagcttccagaataaaggcactgatagcaatcaaagtaccgacaaaggcgatacgccagatagcgtggccgtccagtacatggcgcgaaggatctcgcggattgcggttcatgatgcctctttctgccggttcaaatgccagaccgaaagaaagcgtagtagaggtcgccatattcatccacagaatttgcagcggcgttaacggaatgaccgccccggcaagaatggcaaagatgattagcagcccctgcgccaggttggttggcaggataaacaggatggttttcttcaggttatcgtaaacccgacgcccttcttctaccgcactggcgatggtggcgaagttatcatcagagagcaccatatcggcagcttctttagtcacttcggttcctttgatccccatcgcgatacccacatccgcctgtttcagcgccggtgcatcgttgacgccatcgccggtcatgccaacgatttcacctttggtttgcaacgcttttaccagacgcagcttatgctccgggctggttcgggcgaagatatcgtaacgaaccgcggcttcggccagttcctcatcgtccatatgttccagctgactgccggtaatggaatccgtgccgttgcctattcccagcatcgcgccaattgccatggcggtttcctgatggtcgccggtgatcattttcacgcgaataccggcctgctggcaggtggctatcgcatcaatggcttcagggcgcggcggatccatcatgccggcaataccgacaaacaccataccctgttgaatatcggcatgatccagtttgctaatgccctcgtcagtaggtcggaacgccgcagccaccatacgcaagccctgcttggcgtagcgagccatttcagcttcccagtaatcgcggcggaacggagcgacgccgtttgccgtcagttcctgctggcagaaggtaaatagtacgtccggcgcgccggtcaggaagatgctgttttccgactgaatctgatggctggtggccatatatttataagcggaatcaaaaggaattttaccgagttgattaacctgacccagctcaatgccggatttcgccgccagtacttttagcgccccttcggttgggccgccggtaatcacccaatgaccctgatcgtttttctggatctggctgtcattacataaattcaccgcagtgatgaatgttttcagcgttgggtttgcagctaaatcggcctgctggtcgctgccttcctgataaatattgccaacgggctcatagctttcaccttcaacgcgatagcaatggtcggccaaaattaccgctttcacggtcatttcgttcattgtcagggtgccggttttatcggaacacaccaccgtcattgcacccaaagtttctaccgttggcagcttacggataatcgcccgtttacgcgccatggactgaacgcccagcgacaaaataattgagataatcgccggtaagccttccggaaccgaggccacggccagactgatcagcgccagcaacagttcatcaaccggcaggtcgcgtaggataaaggcaaaaacaaacagtacggccatcatcaccagaatcaggatgaagatagctttaccgaggcgatccatttgctgcagtagcggagttcgggtcgattcaacggtagacatcatctggttgatatgacccagctcggtgtcaccaccggtggcaataaccacgcctttggccgtaccggcgctaatggtggtaccggaaaacagcagatttttacgatcgccaataacggattcgctttctatgactccggtttgtttttccaccaccgtcgattcgccagtaagaatagcttcttcgatctgtaggttgtggccctccagcaaacgcaggtcagcaggaattttgtcaccgggtttcagggtaacgatatcgcccggcaccagatcttttgcatcaatggtttgcgtaatgccatcgcgaataaccacggctttactggaaagcatgttctgaatgcttttcagggatttctcggccttattttcctgaacaaaaccgatcagggcgttaatgaccgcgacgcataagatgattatggtatcgacggaatgccccatcagtcctttaaccaaggctgcggcgagcaggatataaatcagaacatcattaaaatgggcaaggaattggaggaggggatgcttgcgtttcttttctggcaaggcattaggcccgtgcttttttaggcgttttgctgcctcctgctggctcagaccttctgtagtggtattgagctgctctaagctctcatccgtcgtgagctgataccaggttttgcccgatgggggcggcgaggctgacttttggtttggtgtgttatgcattgaaggaaccttctccaaagaattaataaatctaaaattagccgtccttgtgtcctttatttaccggaaaataatgccggtttaacgtcaagccaaaataccttttgccttacgctgtgaacacctataagttaattatttgatttttaaataaaaattaaatgctaatgggttgaacagaaacagtgaaacagcatagttatagtgaggaaggatagtagataattatcagtttactgccttgatctgagataataaaaattaagtaacagaatgttcctataggcgcagaacctgagtttaggcgcgatttttgctactgatatctctacagttacttgcgttatcgctaaaaaatttaacacccaatctctcagcttcattggtaatttatttcgttcagcggataagatgaatatgaatagccactattataaaaaggttattattccgttcgtattcctaattatgtgcttatcttcattaagcaaaacgtggattcttcataataagaatatctgcaaaagtgggtaaagacgctggaacatagtggcatatcgagcgaaactctcagccagcctgaatttgaagctctgaactaattatgactatgctaatcagaagatccggtgaatatgacgtacagccaacaaccagtgaggaaacagtaagtatggataagtggcgatacctggcgattggcgtgtgtctggtgacagcatcaggagcggcgtcagcagattctcttgatgcccaacggcagcgctatcaacaagttaaacaggcgtgggatagcaaccagatggcaacggtggaacagctgttaccaacgctgcgcgattatcctttgtatccctatctggaatatcgtcagttgacgcaagatctcggccaggtcagcgcggcacagatcagtgatttccttaaccgtaatccaacgctgccgccagcgcgttcgttatcctcgcgttttgttaacgagctggcgaaccgtgaagattggcgtgggttattgagctttagcccacagccaccgaagccggtagcggctcgttgtaattattactatgccaaatgggcgagcggcgagcagcaggtcgcctgggacggtgccagcgaaatctggttgaacggccagtctttaccgggtagctgcgacaagctgtttacggtttggcagcaggcagggcaccaaacaccgctggcaacgctggcgcggatgcgtttggcgctcaaggaagggaatgccagtctggtcaacttcttgctgaaacaattaccgagtgattatcaaaccatggggacggcgctggcgaagttacagagcgatccggccagcgtggaaagctttgcccgcaccgtagggccgacagattttacccgttctgccaccattattgcttttactcgcttagcgcgtcaggacgtggaaaacgcccgcgccatgattcccacgctgacacgactacagaagatgagcgagaaagataaactggagctggaagaggcggttgcctggcgtttgatgggaaatgatgccacttacgagcaggcgaaatggcgtgatgaagtcacgttgcgcagccacgccacgccgttgcttgaacgccgtattcgcatggcgttaggcaccggtgaccgtaaagggttacaggcatggctggagcgtttacctgcggatgcaaaagataaagacgagtggcgctactggcgtgcaaccttgctgattgagcagggaaataaagccgaaggcgaggcgatactgcgtgagttgaccaaagctcgcggtttctacccaatggtggcggcacaaaagctgaatataccttatccaatcatggttgaagtggcgaccaaacccgatacctcattggcggacagcccggaaattgctcgggttcgcgaactgatgtactggaatatggataatctggcacgtaacgaatggagctatctggtcgccagccgtagtaaaccgcagcaggaagctctggcgcgctatgcctttaaccaaaagtgggccgatctgagcgtacaggcgacgatagtggcgaaactttgggatcatctggaagagcgcttccctctggcctggccgcaagaattccgtcgggcaacggaaggcaaaggcattactccaagttatgcgatggctattgcccgacaggaaagtgcatggaacccgaaagcgcagtctcctgtgggagccgcaggtttaatgcaggtgatgccacgtaccgcagatcatacggtaaaactgaataatatcagcggctatgtgaacagcagccaattgctcgatccggtcacaaatatcgaaattggcaccagctatctggaagaggtctatcagcagtttggccgcaaccggattctcgccagcgcggcgtataacgccgggccatcgcgagtgaatacctggcttggaaatagcgcggggcagatcgatgccgttgctttcattgaaagtattcctttctctgaaacgcgcggctatgtcaaaaacgtcttggcttacgacgctttctatcgtcactttatgcaccgtccggcaaaggtgctgagtgatgcggagtggcagaggcgttattgatttttgccagtttatgctatgctgctgtactagttaaatagtatggcagcataccatgaccgaaaatgtcgtaatcgatcccgctctttccgctgaagataaccagaactggttaagctttattgcgctgctgcaacaggccgttgcgcaagatcttcaccaaccgttgttgcaactgatgctgacgcccgatgagcgtgcggctttggggacgcgcgtgcgtattattcaggagttaatgcgtggtgaattgagtcagcgggaactgaagaaccaactcggcgccggtattgctaccattacccgaggttctaatagcctgaaagcctcgccaccgcagctgaaaagctggttggaagcgcaattactcaataacgaatcgtcgtcgcaatcctgaaacgattgaaacgtcaggtaaagattgagcctttgcctgacgctctattgcctaatcagctttccagatagaccgagttatggaaaggaactaaagcaagtactaacgcttgatggtaaacgctggtgcgtgacagtttaccatcggtaaagactccaatcgcaccaccctgacgtttcacttccgcattacctgtcaaaagtgccatttcgtcgcctagttcacgaccttgattaattccttgtaatataatttgcggtagcatcaaactggctgagcgggattctccccgctgctgcaagtgttcaacgactatccaggcaaaggtcatattatcttcgataccggcttcgaccccgacccaaaaatctgcttccggctttatctgacgtgctgcggcgacccgctggcgtgctccggtgcgggtttcgtcactgccaattggctggagggatacgccgctatcgacgttgataccttcgatatggcaggcgtctgcgccaaaaacatcgttgaaggcgagagtgatagccctgatctttgcagggttggtagttgcggcaacaacatggtacataatgagcttaagtatcctttagctaattttacgcagtataacggaaatcagacatgttacaggtatatctcgttcgtcatggcgaaaccgaatggaacgcggcccgccgtattcaagggcaatcagacagcccgctgaccgcaatcggtgaacatcaggctcgtctggtcgcacgtcgggtgagcagtgaaggtatcacccacgtcatcaccagcgatttgggacgtacgcgacgcacggcagaaatcattgccgatgcctgtggctgtgacgttattgttgagccgcgtctgcgtgaattgaatatgggcgtgttggaggagcgtggcatcgacggcttaaacgcgcaggaagaacggtggcgcaagcagatggtcgatggtactcctgatgggcgtattcctcagggtgaatccatggctgaactggcggcccgtatgcgtggggctttggaaagctgccttgagctacctccgggcagcaaaccgttgttggttagccacggtatcgcgttaggttgcctgctcagcactattttggggttgccgccccatgctgagcgacgcttgcgtttgcgcaattgttcgctatcccgcgtggattatcagcaaagtccgtggttggcatcaggttggatagttgagaccgcgggcgatatcacgcatctggatatgcccgcgttggacgaattacagcgttaacgtcggataggaatcagatattcgcagtgtaacaccttcggaggctggtcttgtggccggccctgagggaagaaacgttcgatatcatagcctttgcggcgagtcatctccgacagcggcaggcaggtaccatacagtgtcagaataaagtcctgtagcccttccgccggcccttcatagataaacttaacgtattcaccgccctgcaaaataaccggctggccttcagttacgttggctggagtatgttgaggctcaatggccgtggtgtagaatatctcctgctcatcatctttttcctgatttggccgggaatgatgcaagccgtacagtaccggcggcagcttatccgcaccgccaagatattgatgccagaaatgagagcgcaactcggttcggaacgtggaaatttgttccagcgtgcatgaatagctttgggttaaaccaaccaaatgctgttctggcaaggtaataaactcggcctgaggcagggtataagaccccaaccgaataggcgggcagatgcctaaggaatgccagtcttccgctcgacgatagagcgcaggcgtttgcgcaaactgttttttgaatgcgcgagtaaaggtttgctgggagtcgaaacggtattgcagtgcaatatccagaatgggccgactggttagacgcagcgcaaccgcagctttagatagtcttcttgctcggatataggcaccaatagcgttaccggtgacgtctttaaacatccgttgcaaatgccatttagagtagcctgccttggcggcgacattgtccagtgataaaggctggtctaaatgactttctagccagctaagcagatcacgaatgatactggcttgatccatagatcttcctcataaagcggcctggattaaagtaatagcttgagagctgaaaattagctccgccgcatagtagcaattttttttgtctcagactgcttaagatttttattagcaactgtgctaaataatgttgttaagctggcgaaagcttatttccaatgaatatcttattatcagtacaaaaatttaactttgcgtaatctatcgggtgtaatggagtaagtgtatgaaaaaaaattggatattgctttgcggactactttcttttggcgccatgagcgtgcatgcggaagaggttggctcggtggatacggtatttaagctgtttggccctgaccataaaatcgtcattgaagccttcgatgatcctgatgttaaaaatgtaacttgttatatcagccgtgcaaaaaccggtggaatcaagggcggattagggctggcagaggatactgccgatgcggctatctcctgtcagcaggtcggaccgattgagttatcagagaaaatcaagaaaggaaaatctaaaggggaggtggtcttccagaaacgcacttcgcttattttcaaaaagcttcaggtcgttcgtttctacgatgcaaatcgtaacgctctggtgtatctgacttattctgacaaagtcgttgatggttcaccgaagaatgctatcagcgccgtgccgattattccttggacgcacgccaacccataacgaagaattataagcaaaaaaaagccagcacttcagcgctggcttttttataaagttgataaccggttgattactcttccagatcgccacagaaacgataaccttcgccatggatagtagcgatgatttctggcgtatccggagtggattcgaaatgtttacgaatccggcggatggtaacgtcaaccgtacggtcatgaggtttcagctcgcggccggtcattttcttcagcaattcgccacgggattgaattttccctgggttttcgcagaagtgcagcatggcgcggaattcactgcgtggcagtttatagtgttcgccagcagggctgatcagtgagcggctattgatgtccagctcccaaccgttaaatttatagctttcaaccagacgacgctcttcgcccacgctacccagattcatggtgcgtgacagcaagttacgtgcacgaatagttaattcgcgcggattgaaaggcttggtgatgtagtcatcagcaccgatttccagaccgagaatcttatccacttcattatcgcggccagtcaggaacatcagcgcaacgcttgcctgttcacgaagttcccgagccaacaataaaccattcttgcctggcagattgatgtccatgataaccaggttgatatcattctcagacagaatgtgatgcatttcagcgccatcattggcttcatgaactacgtagccttccgcctcgaaaatgctcttcagggtgttacgagtgactatctcgtcttctacgatcagaatgtgcggggtctgcatgtttgctacctaaaattgccaacaaaatagaaataggaagtacagaagtctttgttacataggaatttttattgacttgtaactcgtcatcctatttatcacatgactaaagtacgtaaacgcgttcttgatgcactttccatcaacgtcaacaacatcgctagcttggtcggggtgttactccctacagccccaaaggtgacaaaagcggcgcatatcctaaccctattaacagcaacataacagtgtgagccgaatctaccacccaacaaaactacgctttgttgacatatatcaaattcaattgtagcacgttaacacttttgtgaaaaacacttacaagaataccagcttaagtgatagttggttaaaataactgatcgtttcagtgtatttaatattaaaaaaatcggtttatgtataggtgaataatttaatttgtaatgcattgatttttattgtttaaaatcaacatattctgagtatcagccgtcagtcatgattttcaacgttgggcctctctttcactcaatagataagataaattaccgtaaatgttatataaatgtaaacggcccgtccgttatatttacatcagcagcgttgcggtgaaaaacagcttattcacgtcccatgctccccagggaggtcacccgtagccaaacgtccttattgcctcgctttttccccctttggctctataggaacgaaagaaggaacgaaacacgctttctcattatttgacgaaatgtcaccgtcggctcgcacagaaaacagaaaaaatgctgctgtacatactagggataaaattcgcctgcctggctatatattccttaatttgtgattttatcggtttttactgcttttaatttcttttttatagaatttaaattctttgataccgatgcttaattccgcgagccagttaacaaaaaagtttgacttgggtcgactattgctttaaccaatagagggacagcttcaattatgaaatgagacagacagaaaacatgcgattcatcagcctgactacaacgattattaccaccaccgaaaccacaggttacggggcgggctgacgcgtacaggaaacacagaaaaaaagcccgcacctaaacagtgcgggcttttttttcggttcataaattcaggagagaatcagaaatgcgagtgctgaaatttggcgggacctcagttgcaaatgcggaaagatttttgcgcgttgccgatattatcgaaaacaatgcgcgtcagggacaggtcgcgaccgtactgtctgcgccagctaaaatcaccaatcatttggttgcgatgattgataagaccgtggcggggcaggacatctctcctaccatgagcgatgccgaagctatctttgccgatctgttacgcggcctgtcagaagcgcaaccgggttttgcctatgatcgtttaaaggctctggtttcccatgaatttgcgcaactgaaacaagtgctgcacggaatttccctgttggggcaatgtccggacagcattaatgcggcgattatctgccgtggcgagaagctatccatcgcgatgatggaagcggtatttcaggccaaaggttacccggtgacggtaatcaacccggttgagaaactgttggcgcagggccactatctggaatctaccgttgatattgccgaatctactcggcgcatcgccgccagtgcgattccaaacgaccatatcatcctgatggccggtttcaccgccggtaacgataaaggggaactggtggttttggggcgtaacggctctgattattccgccgcggttctggccgcctgtttacgcgcagactgttgcgagatatggactgacgtcgacggtgtgtacacttgcgatccgcgcaccgtgcccgacgccagattgctcaagtcgatgtcttaccaagaggcgatggaactgtcctattttggcgccaaagttctccacccccgcaccatcgctccgattgcccagttccagattccctgtctgataaaaaatacctctaacccgcaagctcccggcactttaatcggtggcgataacagcgatgacgcttatccggtgaaaggtattactaacctgaataatatggcgatgattaacgtctcagggccaggaatgaaaggcatggtcggcatggcagcgcgggtctttgccgtgatgtcacgcagcggaatttccgtggtgttaatcactcaatcctcttctgaatacagcatcagtttctgcgtacctcagggcgagctggcgcgtgctcgcagggcgctggaggaggagttttacctcgaattaaaagatggtgtactcgacccgctggacgttatggagcggctggcgattatctccgttgtcggcgatggtatgcgtactttgcgcggtatttcagcgcgcttcttctccgcgctggcgcgagccaatatcaatattatcgctattgcacaaggttcttccgaacgatccatttccgtggtggtgaataatgattctgtgaccaccggcgtgcgggtttgccaccaaatgctgtttaataccgatcaggttattgaagtgtttgtgattggcgcaggcggcgtcggcagtgcgttgatcgagcagatccaccgtcagcagccttggctgaagcaaaagcatattgatttacgcgtctgcgggattgccaattctaaagcgttgctgaccaatgtccacggcattgatttggcgaactggcaggagcaactgggcgcggctcaggagcctttcaacctgagccgtttgattcgtctggttaaggagtatcatttactgaatccggttattgtggactgtacttccagtcaggccgtggccgatcagtatgccgatttcttgtccgatggtttccacatcgtgacgccgaataagaaagccaacacctcatcgatgaattattaccgccagctccgtgctgctgcggctaaatccagccgtaaattcctgtacgacaccaatgtgggcgcaggcctgccggttatcgagaatctgcaaaacctattgaacgccggtgatgagctggtgcatttctccggcatcctttccggttcgctgtcctttatcttcggtaaactggatgaaggcatgtcgttatcagaagctacgctgcaagccaaagctttaggttataccgagcccgatccgcgcgatgatctctccgggatggatgttgctcgtaagctattgattttggctcgagaagcgggttacaaattagaactggctgacattgaagttgaatccgtattgccaccatctttcgatgccagcggcaatgtggaaagcttcctgaaacacctgccatcgctagacgcagagttcgctcgtcgggtcgctgatgcaaccgcgcagggcaaagtgttgcgctatgtcggcgtgattgaagacggccgctgtcaggttcgtatggatgcggtcgatgacaacgatccgttgtataaagtcaaaaatggtgagaatgcgctagccttctacactcgttactaccagccaattcctttggtcttacgtggttacggtgcgggtaacgatgttaccgcagctggcgtatttgccgatttgttacgcacattatcctggaagctgggagtttaattatggttaaggtctatgctccggcatcgattggcaatgttagcgtcggttttgacgtgctgggtgcggcggtttcacccgtggatggctccttgctcggcgattgcgttagcgtaacggcagcagacagtttcagtttgcagaatgaagggcgcttcttcagtaagctgcctgtcgatccaaaagagaatatcgtttatcagtgctggcagcgtttttgtcaggaaataggcaaggagatcccggtctcaatgcggttggaaaaaaatatgccgataggttccggcttgggctccagcgcctgttcggtcgtcgccggtttaatggcgatgaacgaattttgcggccagccactggataaggtcactctgcttggtctgatgggcgagctggaagggcgggtgtccggcagcgtgcatttcgataacgtagcgccttgctatctgggggggctacagctgattttggagcaagcggattgcattagtcagtcggtgcccggctttgacgattggctgtgggtgatggcttatccgggaattaaagtttctaccgctgaagcgcgggcgattttgcctgcacaatatcgtcggcaggattgcatcagccacgggcgtaatctggccggttttatccacgccagccacacgcagcagcctctgttagccgctaaactgatgaaagatgtcattgcggaaccttatcgtacgcaactgctgccgggctttgccgcagcgcgtcaggccgcacaggatattggtgcactggcctgcggaatttccggttccggcccaaccctgtttgcggtgtgcaacgaaagcgccaccgcgcaacgcatggcggattggctgcaaaaaaactacctgcaaaacgacgaaggttttgttcatatttgccgtctggataccgcaggcgcacgactattgggataacgcatgaaactctacaaccttaaagatcataatgagcaggtcagctttgcgcaggccatcaagcaaggcttgggtaagaatcaggggctgttttttccgctggaattgccagagtttgaactgaccgaaattgataacttgctagatcaggattttgtgactcgcagcagccgcattttatccgcttttatcggcgacgaaatagctcctgaaaccctgaccaaacgcgttaaagccgcttttgaattcccggcgccagtggctccggtcgaaaacgatgtctcgattctggagcttttccacggcccaactttggcattcaaagacttcggcgcgcgctttatggcgcagatgctggcagaagtagccggtgagcagcccgttaccattttgaccgccacgtctggcgacaccggtgcagcggtagctcatgcattctacggtttgaaaaacgtgcgagtggtgattctgtacccgcgcggtaaaattagcccgttgcaggaaaaactgttctgcaccttgggtggcaacattcataccgttgctatcgagggtgatttcgatgcctgtcaggcgctggtaaaacagtcctttgatgacgaagagttaaaacaagaactgcaccttaactctgctaactcaattaatatcagccgcttgctggctcaaatctgttactacttcgaggccgtggcgcagctgccgcaggaagcgcgtaaccaattggtgatttcggtaccgagcggtaacttcggcgatttgaccgcaggtctgctggcgaagtctttggggttgccggtgaaacgctttatcgccgcgactaacgctaatgacactgtaccgcgcttcctggttaacggtcagtggcagcctaaggctaccgtagcaactttatccaacgcgatggacgtcagccagccgaataactggccgcgagtagaagagctgttccgccgtaagatttggcagttgaaagaactgggtcatgcagccattagcgatgaagtgaccaaagaaaccatgcgggaactggctgaaatgggctatatctctgaacctcacgccgccattgcttaccgcgcgttgcgcgatcagctgcaagacggcgagttcggcctgttcctcgggacagcgcatccggcgaagtttaaagagagcgtagaagcgattctggcgcaggaattaccgttgccgaaagagttggctgtcagagcatcaatgccattgttatctcgtgatttaccggcagattacgatcaactgcgcgcgttcctgatggcattaccgaaataagctagcgcgttttgcaaaatacagcgaactaactaaagcaggaaagggccgattggcccttttctatatgacttttatatataaatagtacatcaatcagcttagtgctgctcgggtcgtttaaagaccagctcgtttttcgccgagagtcccgaatcgaactgatagccttccagattgaaatccaccaattgctcggttttactcaaccggttctgaatgataaagcggctcatcaacccgcgggcttttttggcgtagaaactgataattttgtatttaccgtttttctcatccaggaataccggtttgatcagcgtaccgttcagtttagccggctttattgctttaaagtattcatccgaagccaggttaatcagtacgttatcgccttgctgttccatcgcctgattcagtttctcggtcagggtattcccccaaaaggcgtataagtccttaccctgtgagttagccagtttggtgcccatttccagacggtatggctgcataagatccaacggacgcaacaggccgtataacccggaaagcatacgcaagtgcttctgagcaaaggcaaaatcttcttcgctgaaatcctgcgcctgcataccggtgtaaacatcgcctttaaacgctagaatcgcctgacgggcatttgccggcgtgaatttcggctgccactcgctaaaacgggcggcatttaatccagccaatttatcgctgattttcatcaggctggcaatctggggcggagtcagttcacggcaaatctcaatcagagcctgagactgatccaacaactcgggctgagtgtaggtttgggtagccaatgggctttgaaaatcgagagttttagccggagagataataataagcatgacgacatcctgtttatccagattggcacactgtagcaaaaagcgagcggtaaccaaacgaagaatggtcaattgctaagataggaagcatcgcgtggctaaatcgtctcagcatcatgataatgaaccaagttgttattaatccacggggttcaacgccttttcgcaggcgaaaacggttgctcggagaagtcggcgcgaccggtgtttttttaaacagttgaactgccttgcaccggggcttctgcgtgttattatcaagaaaaggctgggttgcagaatgccaaaagttcatgcacaaacgatgagaaacgacaacatgaccgataaacttacttccctacgtcaattgactaccgttgtagctgacaccggggacattgcggcgatgaaactgtatcagccgcaagatgccacgactaacccctctctgatcctgaacgcggctcaaattcctgaataccgtaaattgattgacgacgctatcgcctgggctcgcgagcaaagcagtgataaagcgcagcaagtcatcgatgcgggtgacaagctggccgttaacatcggtctggaaattctgaagctgatcccaggccgtatttctaccgaagttgatgcgcgtctgtcttacgacaccgttgccagcgtagcaaaagccaaacgcctgattaaaatgtacggtgatgcgggcatcagcaaagaccgtatcctgatcaagctggcttctacctggcagggcatccgcgccgccgagcagttagagaaagaaggcatcaactgtaacctgactctgctgttctccttcgctcaggcgcgtgcttgtgctgaagcgggcgtatatctgatttctccgtttgttggtcgtattctggactggtacaaagcgaacggcgacaagaaagagttcgcaccaaacgaagatccgggcgtgatttccgttaaagaaatctaccagtattacaaaaaacacggctacaaaaccgtggtgatgggcgcaagcttccgtaatattggtgaaatcatcgaactggctggctgtgaccgtctgaccatcgctccaactctgctgaaagagttggcggaaagcgaaggcccactggagcgtaaactgtcttacaccggcaacattgccgctgcgccagcgccgctgactgaggctgagttctactgggaacacaaccaagacccaatggccgttgagaaactgactgacggtatccgcaagtttgctgtcgatcagggcaaacttgagaagatgattgccgatctgctgtaattttataccggcaggcaacattgaacgaaaaaggtggcgtaagccgccttttttacgtctgaagctcgcctatttctgctctgtgacggaacaaaactatacttgattctgtgagttgagagggttgaggtaatagcgtcgcgtagtatcatcccgcccacagagaaagattttttcattgaggtcgttgtatgcatacattgcgtgtaggtttagtgtccatttccgatcgggcatccaatgggatttatcaggataaaggcctgccagcgttggaagactggttaaaaagtgccttaacgagtgaatttaccctcgaaacccgtttaatccccgatgagcaaacgctgatagagcaaaccctgtgtgagctggtggatgaaatgggctgccatttggtgttgaccaccggcggaacgggcccggcgcgtcgcgatgtgacgccggatgcgactctggccatcgccgatcgtcaaatgcccggtttcggcgagcaaatgcgccaaatcagtctacactttgttcccacagcgattttatcccgccaggttggcgtgattcgcaaacaggcgctgatactgaatttgcccggccagcctaaggcgataaaagaaacgctggaaggagtaaaagacgcggaaggcaacgtgttggttcatgggatttttgccagtgtcccatattgcattcaattgttggatggcccgtacattgaaaccaacagtcaggtggtagcagcattccgtcctaaaagtgccttacgtgatacaaaaatctaaattcatatagtttctgacataagataccattctaagcatgtgaggatttttgtacggtatagtaatttttactttacaaagagttgtaatatttttaactcaatactctggcttatcacggtgtcttatggatcaacagcacaatcgccgattgaatcggcaagattataaaactctgacgttagccgctttgggcggagctttagagttttatgacttcattatctacgtattttttgccgcgattatcggtgaactcttcttccctcccgatatgcctgagtggctacgtcaggtgcagacctttggtattttcgccgccggttatctggcgcgaccattgggcggcattatcatggcgcacttcggcgatttggttggtcgtaagaagatgtttagcctgagtattctgttaatggctttgccgacgctggccattggtctgctaccaacttatgccactatcggtattgccgcacctttgttactgctgctgatgcgcgtattgcaaggcgcggctatcggtggagaagttccgggcgcctgggtatttgtggccgagcatgtaccgcgtaaacgcgttggttttgcctgcggcaccttaaccgccgggttgacggcgggcattctgctaggctctctggtggctgcggggatgaaaaccaccataagcaccgaggcaatgatgaacggcggctggcgtattccattcttcctcggcggtattttcggcctgttcgctatgtatcttcgccgctggttacaggaaacgccgatctttaaagagatgcaggcgcagaaagcgctggcagagggtttgcccttgaaatcggtcgtggttaaccataaaaaagaaatcgtggtttcgatgctgctgacctgggtgctgtccgctggaatcgtggtggttatcctgttgacgccaacctatctggaaaaacagtacggcgtgatgtcggcgctggcgatgcaggcgaatagcgtggcgattgtggcgctggtctgcggctgcatactctctgggctggccattgatcgctttggcgcgagtaaaacctttatcgtcggcagcgtgttactggcggtagcgacttggtcgttttatcaggctgatttaaccgatcctgtcaagctgttcactcattatacctttgctggatttagcgtggggattgtcggtgcggtaccttatgtgatggtccgggcttttccggcagaaatccggtttactggaatttcattttcctacaatgtggcatacgccatttttggcgggttgacacctattttggtcacgttattgatgaaagttacgcctatggcacctgcctattatatgttgctgttatcagtggtcgggttcctgttggggatatatttacgtaatgatattaatagtgatctgaatgtacagttgtcaaagagggttctggctgagtagataaccgccaattagatgattattctaaataaatagcccatacatcatgggctatttttaactcgtataatttaaaattcgtgcttgaaattaaaaccaactttttgcttaacacgagctgagggttgcgaaataacttcagaaaataatgttctagcgccttgttgttgtaaatatcttgccagcgctctaaccgctgcggtccccgctcctctgactgtaccgtcgcgatcgggaaataggacataatctggtagtgttgctgatgcaaccagttcaacttcatctttgctgttaaaacggtcggcaagaacaaccgcgataatttttccctgtagtttgactaccacatagatttcaccggggcgttgaagccttaatctacgatggataatacctgtaacgatatgcccagcatggaggagtctactgagggcgctgttattttcatttgcgccggaatccgcgccgaaatccgcgttggaatctgcactggaatccgcactggaacctttgatatcttgttcgatatgcgttccttggtactgcatcccccattgcgcgatagtttcactcagctttttacgcatggctcgagcattcttaacttcactatctgaaagcttttcttcttcttccggtgttagcgttgggattatctctatttcgaattcagtatcattttgcacaacgggctcaccctgcgaaattattattggaggcgtatctctatagacaaatgtctctagtaatagctcgtaaatacctaagggtaatagctctatctgagagggcgactcatcagaagaagaagagaaactataatttaagtaattgagttgagcatagtcaaatgctgttttaatatgatcaagcgtattttctgtgtttttctcagctattttttcttttatagactgaactaatcgattccctgtctctttattttctactgtaacacctatatttcctgtccggatgatggaatctaggattctgccaaaaaatgcggcattccaagtttcgggactatgaccgaataataaggtgaagtcagtcataatatccagcgtccattcaatacagtgaggtcttatttgacgtgtttgacgagaattaagtagagagtaaagagacactctacaggcttttgctacagcaggaagactcagtgcctgaccatgttgattggtgtcgatataagttaatgtcatataatgatcaaaaatttcttgtatttgtaacgctggtgttcttgacggctttttcttcagtggactactgcttccagcaatatgtaaagttttaccttgtgtattactgctaaaatatttatctgcacggaatacaataccatccaattgttgacatgtatcttgcattagatagttatagatatttaaaaaaggagtaaaggcgcatagtattttactggtttgtgccacatctcttttttccaaatacttatcgcctgtatctgcggtgagtatagattttgcgagaactaaaggattatctttattgtggttggttatgattatttctgtatctgtatctgtatctgtatctgtatctgtatctgtatctgtatctgtatctgtatctgtatctgtatctgtatctgtatctgtaaatgatgaagcatcattatcccaaccaaaagaaataatgggagaaatatctactagattactctccaacatttgcatgtattgaagttgtattgtgtctttttttatttgtataataaaagctaagttatcgatattgttgtagtgatcaaaataaaacttatttttcatttttcgatcagaaaacataacgcccctgttacttatgctaatattcgggccaccagaaattttgatgctatacttatcgcctccattcgtacctttactatcaaactctagtagaacctgtttgttttgtaagcgttcatcagtccagtattgaccaaatgctttagtgatgtttattttatagttatttataacaacacatcgttgatcacaattaataccttctttttctgatgctttaatgctagtgatgacattgctcatttccagcgcttgtaaatcgctgtcattgacgctctctgttaacccgaaaaaaggaggattgtaattatcattcttatatacagttgcgagcataccaggcggaatgctgatggattttattctatcattaggaataggtaattctttttgtccagattcaataatgatttctggatcgctatataaatctattttctgatgtgatgctaaacaagtactttcaccttgaaaatcatcctctgtataaaaacagattgcaggttctacctgatatgagcctattttattatataattctaatgctattaactcaggtagattaatatcatgtttcactcttgtttttgtaccagagaaattaatgccactataaagggtgagcaccatacctggtgggatagaaattgatgctatctcattatcaaagccatcattataaatagagcctgattccctttctgcggagcaaaatgattccccttcaaatttgtcgagttcataaaaacagacttttgtttcgtctgaataggatggttgcgatattattaatatgatgcttgctaatagtcttgtaactatacgcataggctctccctttgatgttattgatttttatgtttcatatcatcgacagggtttcaatactatatgatgcgtattttctttgctttatctatttttatttctctattttattatttagcagtgctaatttgagatttatgtaatttagatttaaatataaaaaagtaaaaataaaaaaactccgaatataaacattcagagtttttgggatatgaattttcaagcaaactgtaattaaactatcggttgcttaggcaaagtctagcgtggttcgccaatcggtaacactgtgcgaccatattgttcgttcaatacttcagccattgccagataaatcgcgctggcaccgcagatgatgccttcaaaaccagcgaacaccagcagcgagtgattaccggtaaagttaccgatagccaacagggcaaacagcagtgtcaggctggcaaacacgaattgaagcgcgcggttggctggcaaggtgccgaagaacataaacagggtaaagatgccccagatcccgaggtaaacgccaaggaactgtgcgtcagtggcttctgccatacccattttaggaagcatcagcaagccgaccagactcagccagaatgcgccgtaagaagtaaatgcagtcgcggcaaaggtattcccttttttatattccagcagaccagccagaatttgtgccaaaccgccgtaaaaaatccccatgctcaggataacggaagtcagggggaagaagcccgcgttgtgcaggttgagcaagacggtggtcatcccaaagcccatcaggcctagcgggccaggattcgccaacttgttggtgttcataagtcctctgcaataacagattgctaaaaaaatggataaatatccgaataagtataaatcgcctgaatgagtaaaaagtcgtctattccctcagtgcgcgcggcatcataatgatctgttcgaccggaaacaatgatcttgagtgcgataaaaagtaattttttttcatctccccccttgatgatggttttcatggccccatcttattcccaaccgcagtgactaatcgtggttagcggaaaattgtcagtaaatatttggcagttgaaaattagaaatccgcccatatatagattagtaacttgaccgattatgacttttttcgtggaggcgttttagatgggtaaaattattggtatcgacttgggtactaccaactcttgtgtagcaattatggatggtacaaaagcacgcgtgctggaaaacagcgaaggcgaccgcacaacgccttctatcatcgcgtatacccaagatggtgaaactctggttggtcaacctgctaagcgtcaggctgttactaacccacagaacaccctgtttgcaatcaagcgtttgattggtcgtcgtttccaggacgaagaagcacagcgtgataaagacatcatgccgtacaaaatcgttgctgctgataacggcgatgcatggctggaagtgaaaggccagaaaattgcaccaccgcagatctctgctgaagtgctgaaaaaaatgaagaaaacggctgaagattatctgggcgagccagtaactgaagcggttattactgtacctgcatacttcaacgatgctcagcgccaggcaactaaagatgctggccgtatcgcgggtctggaagtgaaacgtatcatcaacgaaccaaccgcagcggcactggcctacggtctggataaagaagttggcaaccgtactatcgcggtttacgacttgggtggtggtactttcgatatctccatcatcgaaattgatgaagttgacggcgaaaaaaccttcgaagttctggcaaccaacggtgatacccacctgggtggtgaagactttgatagccgcctgatcaactacctggttgaagaattcaagaaagaccaaggtatggatctgcgtaccgatccgttggcgatgcaacgtctgaaagaagcagcagaaaaagcgaaaattgaactgtcttctgcacaacagactgatgttaacttgccatacatcaccgctgatggcagtggtccaaaacacatgaacatcaaagtgactcgtgcaaaactggagtcactggtagaagacttggttaaccgttctatggaaccgctgaaagtggctctgaaagacgcaggtctgtctgtatctgacattcaggacgttatcctggtcggtggtcagactcgtatgccaatggttcagaagaaagttgctgacttcttcggtaaagaaccacgtaaagacgtgaacccggatgaagccgttgctatcggtgcagcagttcagggcggcgttctgtctggtgaagtaaaagatgtgttgctgttggacgttactccattgtctctgggtatcgaaacaatgggtggtgtgatgactccgcttatcactaaaaacaccaccatccctactaagcacagccaggtgttctctactgcagaagacaatcagtctgcggtaaccatccatgtgctgcagggtgagcgtaaacgtgcgcaggacaacaagtctctggggcagtttaacctggatggcattcaggccgcgcctcgcggtatggcacaaatcgaagttaccttcgatatcgatgccgacggtatcttgcatgtgtctgcgaaagacaaaaataccggtcgcgagcagaagatcaccattaaggcatcttcaggtctgaacgaggaagaaatccaaaaaatggtacgcgatgcggaagctaacgctgaagcagaccgtaagtttgaagagctggttcagactcgcaaccaggctgaccacctgattcatggcactcgtaaacagttggaagaagctggcgacaaactgccagcagaagacaaaactgccattgaagatgcactgaaagcgctggaagcagcggttaaaggcgaagacaaagcggaaatcgaagcgaaaactcaggcactggtccaggtttctggcaagttgctggaaatggcacagcagcaggcggcagccggcgaagcgggcgatgccagcgcgaagaaagaagacgacgttgttgacgccgaattcgaagaagtaaaagacaaaaaataatagcccttaagcgggcacagcagtggtaagagatactgttgctggaaaccagcacgggcgtcgaggaaactctacgcccgtgcacgcatgttaagggtaggaaaaacagaatggcgaagagagactattacgagattttaggcgtccccaagacggcggatgagcgtgaaatcaaaaaggcctataagcgcctggcgatgaaattccatccggatcgtaatcaggaacaggacgccgaaggtaaattcaaagaagttaaagaagcctacgaaatcctgaccgatgcgcaaaagcgcgctgcttacgatcaatatggccatgcggcttttgaacagggcggtatgggcggcggcggcggatttggcggcggcgctgattttagcgatatctttggcgatgtatttggtgacatttttggcggcggtcgtcgtcagcagcgcgccagtcgtggttccgacctgcgttacaatatggatttgacgttagaagaagcggttcgtggtgtaaccaaagaaatccgcattccaacgttagacgagtgtgatgtttgccacggcagcggagcaaaaccaggcagttctccgatcacttgtccgacttgccatggtgcaggtcaggtacagatgcgtcaaggcttcttcaccgtgcaacaggcgtgtcctcattgccacggccggggccaaattatcaaagatccgtgcaacaaatgtcatggtcatggccgcgttgaaaaatccaaaaccctttcggttaagatcccggcgggtgtggataccggcgaccgtatccgtttagcgggcgaaggtgaagctggtgaacacggcgcaccatcaggcgatttgtacgttcaggttcaggtgaaagctcacccgatcttcgagcgtgaaggcaataatctgtattgcgaagtgccaattaactttgcaatggcagcgctgggcggtgaaattgaagtaccgacgctggatggccgggttaaactgaaggttcctgcggaaacgcaaaccggtaaattattccgtatgcgcggtaaaggcgttaaatcagttcgcgggggcagccagggtgacttgctgtgccgtgtagtcgttgaaacgccggtaagtttgagcgagaaacagaaacagttactgcgtgaactagaagaaagtttcggtggtgcagcgggcgagaaaaacagcccacgctctaaaagcttcctcgacggtgtgaaaaaattctttgatgatttgacccgttaatcatagaacctatgattaggtagtggaaactaaatccctggtatataccggggatttttttcgccaatacttgcagctgcaacgtgatgttaatcattaattgctcggtttatacgagtggttaatgcaataaaaacgactattttcgagttaataattagcctagaatttgtaaattatttgccaatctctttggttggtttctctgtccgatgtagggagtattcattgtgacaaatattattcgccaattcttacgactagaagcggccgggggcatgattttgatcgtggccgcggtggttgctttactgatggctaacagcccactacagggtatttatcaaacgttcttagacattccggtcgcggtaaaaattgcgtcattggatatcagtaaaccgctattgctgtggattaatgatggtttaatggccatcttctttttggtcgttgggctggaagttaagcgcgaactgatggaaggttctttggctggccgtgataaagcggtatttccggctatcgcggcattaggcgggatgttggctccggcgttgatttatctgttatttaacggtgcagatgaagttacccgtcaggggtgggctattccagcggcaacggatattgcctttgcgctcggtgtgatggcgctattgggtaaccgcgttccaaccagtttgaaagtgtttttactggcgctggcgattattgacgatctgggcgtcattattatcatcgcatttttttatactcaggatgtttctctggccgcattgggcgcggcagccgcagcgattgcgctcttggcttatatgaactggcgcggagtcgggaaaacctcggtttatctacttgtcggcctgattctgtgggtgagtattctgaaatccggagttcatgcgacgctggccggtgtgattgtcggctttatgattccgttgcataccaaagataagtcttcaccttccgaatctttagagcacgggctgcatccgtgggtggcttatctgattttaccgctgtttgctttcgctaacgcgggcgtatctcttgaaggcgtttcgcttgcgggactgacgtcgttgctacctttggggattgccagcgggctgtttattggtaagccgttggggattttcctcttcagttgggtcgcggtgaaggttggcatcgccaaactgccggaatccattaattttaaacagatttttgcagtgtcagtgctgtgcggtatcggttttactatgtctatcttcattgcttcactggcgttcgaaggtggaagcgaagctttgagcacttactctcgcttaggtatattgctgggttctacagccgcagcgattgtgggatacacactgctacgcttggttttaccgaacaaaacgccggccgttaccgcaaaataattgtcgtaaatcattagaaggaataggccgaactgccgatgtagtgctcttttacaacgtcggcagttttgcttgatgggttcccgagatcgcattatgttttgatctcagaacaaaggaagttgatcgctcgggaaattgatcaccctatcgggcgatacgttaaggagatcactgcatgcgaatgtcacatatcaattttaaccacctctactatttttggcaggtgtgtaaggaaggctcggtagttggagcggcggaagcattgtttctcacgccacagaccattactggtcagattaaagccttggaagaacgcttgggcgggaaactatttaaacgccaagggcgcgggctggtaccttcagagttaggccagttggtttttcgttacgccgataaaatgttcatgcttagccatgaaatgctggatatcgttaattaccgtaaagaatctaacctgctgtttgacgtcggcgtggccgatgcgttatccaaacgattggttagccgagtattagaaaccgccgtggtggataacgagcagatacatttacgctgcttcgaatctacccacgaaatgttgttagagcagttaagtcagcacaagctggatatgatcttgtctgactgtccggtagattccagccaacaagaagggctgttttccgttaagctgggcgagtgcagcgtgagtttttattgccgtcagccaataccggaagcgccttttcctgcgtgtttgcaggagcgtcgtttgttaatcccaggtcgccgttctatgcttgggcgcaagttactgaactggataaacagcaaaggaattcaggttgagattctgggcgagtttgatgatgccgcattgatgaaggcgtttggggtctatcacaatgcaatttttgtcgcgccatctatgtatgccgatgatatcttttcaaatgaacaggttgtggaaatcgggcgtttagataatgtgcatgaagaatattacgttatctttgcagaacgaatgattcagcatcctgcggtacagcgtgtgtgtaataaagatttcacgtcattatttaacagttgaaagctcagtggttaaagtttaatcgctgggcatttaatagccgaaagtttgactgttgatgatttaaccgctgaaagtcggtttgatagataagaacgtagtcagcaaagaggatgctctatcagattatcgggtaggataaactggtagggcgacctaagatttgaatctgtgaccaaattgcagatataaaaaaaccggcctaggccggtctttttacaagcagtcaacttaatgcattactgcattgcgttgatttgcgctgtcaggtttgacttatgacgcgctgctttgtttttgtggatcagacctttacaggactgacgatccacaattggttgcatttcattaaatgctttttgcgccgcgtctttatcgccagctgcaattgccgcatataccttcttaatgaaggtacgcaccattgagcgacggctagcgttatgcttgcggcgtttctcagactgtacggcgcgtttcttagctgatttgatattagccaaggtccaactcccaaatatattctattgaggacaattcaaaggccgaggaatatgccctttttgccttcgtttgtcaatggatttgtgcaaataagcgccgtttgtacgggcggcacttgctacgttgtgatggagcgggattttaccagcttcgagcggtggaatacagtctttcgaaagaaaattccaccggcctcacctattaagccttcggcgatggtttttgcaaaagtcttaacggggggtctgtatccaactgctcgcgcattctacaggataaactggcgtaaaagtgttttaactgcgtattatcggtaaattgctatgactattggagtaaaggtgccaatcgcgggttaaccttaaccgctgtacaaggtataatccggcgatttccactgttttgagccagctatggagctaattcgcggtatacataatatccgggcacgccaccatggttgcgtgctaactatcggtaatttcgacggtgtccatcgtgggcatctggcattactggagcaactcaagcgcgaaggtcagcgcttagggctaccggtaatggtgatgatatttgagccgcagcctttggaactattcgcagcggaaaaagcaccggcccggttaacgcgtttacgtgataaagccaaatatttggcacaggccggcgttgactacttattgtgcgttaaatttgaaccgcgttttgctgccaatatggcccagacctttgtggctcagttactggtagaaaagctcggcgttaagtttctggcggttggggatgattttcgctttggcgctgggcgtcagggggatttccgactgttgcagcaggctggtgccgagtacggtttcgatgttatcagcaccgacagtttctgtgacggtggcttacgcattagcagcacggcgattcgtcaggcgctgcatgatgacgatttgtcactggcagaaacgttgcttgggcacccttacagcatttctggacgggttgttcatggtgatgagctggggcgaaccattggttttcctacggcgaatttaccgttaaaacgtttagtcgctccggtcaaaggagtgtacgcggttgaagtgtatggcttggatccagagccgttacccggcgttgccaatatcggcacgcggccgaccgttgccggcattcgccagcagctggaggttcatctgcttgatgtaactatggatctttatgggcgccacattgatgtggtgctgcgcgcaaaattgcgtgatgaacagcggtttgcttccctcgatgctttgaagcagcaaatcgccaatgatgtggtgacggcccgaaatttcttcgggctaaagacaccggtttaatatttctagccgaaaacggaaccgagaatctaatgagtgactacaagaataccctgaacttgccggaaacagggttcccgatgcgcggcgatctggcaaaacgcgaacctgagatgctgaaacgttggtatgagcaggatttgtacgggaaaattcgtgcggccaagaaaggtaaaaagtcctttattttgcacgatggccctccgtacgcgaacggcaatattcatattggtcactcggttaataaaattctcaaagacattattattaaatcgaaaggtatggccggctttgactcgccttatattccaggctgggactgccacggtctgcctatcgaattgaaagttgagcaactgattggtaaaccgggtgaaaaagtcaccgcggccgagttccgtgcggcctgtcgtaagtacgcgacagagcaggtagaaggccagaaaaaggactttatccgtctgggcgtgttgggtgactgggatcatccttacctgacgatggacttcaaaactgaagccaacatcattcgcgcactgggtaaaatcatcgataacggccatctgcacaaaggtgctaagccggtgcactggtgtaccgactgtggttcatctttggccgaagcggaagtggaatattacgataagacttctccgtctatcgacgtgcgctttaacgccgctgatgcagccaccgttgccgcgaaatttggcgtttctgacgttaccggcccgatttctctggtgatctggacaaccacgccgtggactctgccagctaaccgcgcgatttcactgaatccagaatttgtgtatcagctggtgaaagtgggcgacgagaatttgattctggctgccgatctggtggaaagcgtgatgaaacgcgccggaatcatcgagtggactgtgttgggcaactgccagggcgcggatctcgagctgctgcgtttccgtcatccgttcctggatttcgacgtgccggcaattttgggcgatcacgtgactctggatgccggtaccggtgcggttcataccgctcctggccacggcccagacgactttgtaatcggtcagaaatacggtttggaagtggcgaatccggtagggccaaacggctgctacctcaccggcacttacccaatgctggacggcgtatttgttttcaaagctaacgatatgatcgttgagctactgcgtgagaaaggcgctttgctgcacgtagagaaaatgtctcacagctacccgtgctgctggcgtcacaaaacgccgattatcttccgcgcgacgccacaatggttcatcagcatggatcagaaaggtctgcgtaagcagtcgttggaagaaatcaaagacgtgcagtggattccagattggggtcaagcgcgtattgagaccatggttgccaaccgtcctgactggtgtatttcccgtcagcgcacctggggcgtgccgatgtctctgtttgtacacaaagaaactgaagccctacatccgcgcagcactgagctgatggaagaagtggcgaagcgtgtagagcaggatggcattcaggcgtggtgggatctggatcccgcggaaattctgggtgcggacgccgacgattacatgaaagtaccagacacgctggacgtttggtttgactcaggttcaacccattcttcagtggttgacgtgcgtcctgaatttaacggctatgctccggatatgtatctggaaggttctgaccagcatcgcggctggtttatgtcatcactgatgattgcaactgcaatcaaaggcaaagcgccttaccgccaggtgctgactcacggtttcaccgttgatggccagggccgcaaaatgtccaaatccatcggtaataccgtcagcccacaggatgtgatgaacaaattgggtggcgacatcctgcgtctgtgggtggcttcgacggattacaccggcgaaatcgccgtgtcagatgaaattctgaagcgctctgccgattcttatcgtcgtatccgtaacaccgcgcgcttcctactggctaacctgaacggtttcgatccggttcagcacatggttcagccggaagatatggtggtactggatcgctgggcggtaggtcgcgcgcaggcggcgcaggctggcatcatcgaagcttacgaaaattatgatttccatctggttgtccagcgtctgatgcagttctgttcggtcgaaatgggctcgttctatctggatatcattaaagaccgtcagtacacggcgaaaggcgacagcgttgcccgccgtagctgccaaagcgcgttgttccatatcgccgaagcgctggtgcgctggatggcgccgatcatgtcctttactgccgacgagatctggaaccaactgccgggcgagcgtccagagtatgtcttcactgaagaatggtatcaggggctgtttggcctgaccggcactgaaagcatgaacgacagcttctgggacgaactgctgaaagtccgtggcgaagtgaataaggttctggaacaggctcgtagcgataagcgcatcggtggctctctggaagcggatgtgactctgtttgccgaacctgaactggcggcgcgtctgaacagcctgcaagatgagctgcgttttgtattgctgacttccggcgctcacgtagcggattacgctgcagcaggggatgatgcacagcaaagtgaactcatcagcggcctgaaaatcaccttcaagaaagccgatggcgagaaatgcccgcgttgctggcactacacgcaggatatcggtctggtagcggaacacgcagatttatgtggtcgctgtgttactaacgtggccggtgacggcgaagagcgtaagtttgcctaatgagtaagccgatttgttcgaccggattgcgctggctgtggctggcggtattggtggtggcattggatttggggagcaagcagtgggtgatgactcaccttgcgttgggagagtcgatccctctgatccctttctttaatatgacctatgcacaaaatccgggggcggcgtttagcttcctggcggataaagatggctggcagcgctggttctttgcgctgatcgccgtcggtatatcggtgacgctggcggtactgatgtaccgctccagcggcaaacaacgtctgataaactgtgcttatgcgctgattatcggcggtgccttaggcaatttatttgatcgtatggtacatggcgtcgttatcgattttattcatttctacgttaatgactggcattttccgatcttcaatctggccgacacggctatttgtatcggtgcagcgctagtggtatttgaagggtttttaagcccttcagaaaaagccgcaccaaagaaaggtgagtaatatgtcagaccgggtacaggataacagtgccgttttggtgcattttacgctgaaactggaagatggctctacggctgaatccacgcgcacacacggtaagcctgcgctatttcgcttaggcgatggcagcttatccgatcagttggaagaagagctgcttggcctacagattggtgacaagcatgcctttactttgccaccggaagcggcgttcggtctggaaaacccggatctgattcaatactttagtcgacgtgattttgctcaaaccggcttgccggatgcgggcactatcatgctgtttaccacccgagacggcagtgaaatgccgggcgtggtgcgtgaagtggctgaagaatccgtcaccgttgatttcaatcatccgttggccggtcaatctatcagctttgatatagaagtgctggagattgatcctcaacaggaggaatctcatgcaaatactgctggctaatccacgaggcttttgcgccggagtcgatagagctatcagcattgtagaacgcgcgttggagatgtacggcgcgccgatctatgttcgtcatgaagtggtgcataatcgctacgtggtggatagcctgcgccagcgcggagccatctttatcgaggaaatatcggaagtgccagatggctctattctgatattttctgcccatggcgtttcccaggccgttcgggcagaagcccgctcgcgccagttgacgatgctgtttgatgcgacctgtccgttagtgaccaaggttcatatggaagtggctcgtgccagccgtaagggcaaagaggcgattctgattggacatgcgggccacccggaagtggaaggcaccatgggacaatacagtaacccggaagggggaatgtatctggtggaatcgccagcggacgtgtggacgctggaagtaaaaaacgaagataatctgtgctttatgacgcaaaccactttgtcggttgatgatacgtctgaagtgatagatgcgctgcataaacgcttccctaagattatcggtccgcgtaaagatgatatttgctacgctaccactaaccgacaggaagcggtgcgcaatctggcggataaagcggacgtggttttggtcgtcggctcgaaaaactcgtctaactcgaaccgtttagccgaattggcacaacggatgggcaaagcggcttatctcattggctctgctgatgatatacaagaaatttggctgaacaatgtttcctgcatcggtgtgactgctggagcctcagcgccggatattctggtacggcaagtcattgctcgcctgcaagatctgggggcgggtcactcaattgaactgagtggcagggaagagaatattgttttcgaagtgccaaaagagcttagggttaacgtaaagcaggtcgactaagttagccgaatataaaaaagcagccttggggctgctttttttatggcaaaagaaaacccaaggtaacggtttggatacagtaatgttaaatgagtttcttctggctactccttgaaaatgcatgaatatgcgtaaagatgcagcgctgaaaatttgcccgttttcggtttgttatgcagaaattgagagaattccatctgattatccgatgcgccggcgctttttacctgcaatagatgagtaattaagtgctttcactgataaaaatgagcggatatcatttttttctaatacagcttaaatagtctggcagactcagtggcagaccgctaatctgaaccctgatcagggctgatataaaacaacaagaggatttatgactgattcagcaattcgtgtcgctattgtcggtgccggtggccgtatggggcgacaattgattcaggccgtgcatcaaattcctggagtaactctgggtgctgcgctggagcgcaaaggttcgtcactggtaggcactgatgccggcgaactggccggtatagggttgctaaatatcaaggtggcagatgatgttgccgaagcaataaacagctttgatatccttgtggactttactcgtccagaaggctcgttggcgcatttggctctgtgccgccagcacggaaaaggtatggttattggtacgactggctttgatgaagctggcaaagctgcgattagcgccgcggcggcagatattgcgattgtttttgcggccaattttagcgtaggcgtcaatctggtccttaagctgttagagaaggccgctaaagtcatgggtgactacgccgatatcgaaattattgaagctcaccaccgccataaagtcgatgcgccttcgggcactgcgttggcgatgggagaagcgattgcggaaacgttagggcgcgatttaaaagactgcgccgtttatagtcgcgaaggttataccggcgagcgtaaggaagggactatcggttttgctaccgtccgtgcgggggatattgtgggtgagcatactgcgatgtttgcagatattggcgaacgggttgagatcacccataaagcgaccagtcgtatgacttttgctaatggagcaattaaatccgcaatctggctatcaactcaggataaaggattgtttgatatgcgagatgtcttgggtttaaacgatttataatatgtaatgtaccgctgtgatgtggttattcctatcataactatctgatagtagagcgatatttttatcgctcttttttattttgttattttaagtgttaagtggttattttattattagatggctgtttttgtgttttttaatgtgtttttcagcgttttattgaaattttacgactcctatcattgccaatttgccttttctctctccgaatacgttaaaattcactctatcaccctcgcaaccgtttactatgttaacttagtttgtatttttgccgccataaacccactattttggcgagatgggcaaaaaacaaagaaaaaatggtactttggctagacaagagcctagctcatcattaaaatgcgcccaatttgccaaaaattagctttgagggcggtttttgcattgatttagatcgttaattctgaattaatatgcagataatgtgactgtttattccttggagggtgttttgattaagtcagcgctattggttctcgaagacggaacccaatttcacggtcgggccatcggggcagaaggttcggcagtgggggaagtggtcttcaatacgtcgatgaccggttatcaagaaatcctcactgatccttcctattcccgccagatcgttactcttacttatccccatatcggcaatgtcggcaccaacgccgccgatgaagaatcctccgcagtacacgcccaaggtcttgttatccgcgacctgccactgattgccagcaactaccgtaatgaagaaggcttatccgaatatctcaaacgccgcaacatcgttgcgattgcagatatcgatacccgtaagctgactcgtttactgcgtgagaaaggcgctcagaacggttgcatcatcgctggcgacctgacggatgcggctgtggcactggaaaaagctaaagctttccccggtctgaaagggatggatttagcaaaagaggtcacgaccaaagaagcttacacctggctgcaggggagctggacgctggaaggcgaactaccggcggcgaaaaaagctgaagaattacctttccatgtagtggcttacgattatggcgtaaagcgtaatattctgcgtatgctggtggatcgtggctgccgtctgacggttgttccagcgcagactccggcggaagacgtgctgaagctgaatccagacgggatcttcctgtccaacggcccgggcgatccggaaccctgcgactacgccattaccgcgattaaacgttttctcgaaaccgatattccagtctttggaatctgtttaggtcaccaactgctggcactggccagcggcgcaaaaacggtaaaaatgaagtttggccaccacggcggcaaccatccggtgaaagatttggatggcaactgcgtgatgattaccgcacaaaaccacggcttcgcggtggatgaaacctcattacctgccactttacgtacaacccacacttcgttattcgatggttctctgcaaggtatccatcgtactgataaagcagcgttcagcttccaggggcaccctgaagcgagcccggggccacatgatgccgctccgctgtttgaccactttatcgaactgattgaagcctaccgcgcatcatcatcagcaagcactaatagcaagtaatcaggagctaagaccatgccaaaacgtacagatataaaaagcatcctgattctcggcgctggcccgattgttatcggacaggcctgtgagttcgattattcaggtgctcaagcctgtaaagccctgcgtgaagaaggttatcgggttattttggtgaactccaacccggcaaccatcatgaccgatccggaaatggccgatgcgacctacatcgagccgattcactgggaagtggttcgcaaaatcattgaaaaagaacgtccagacgcagtattaccaaccatgggcggccaaaccgcgctgaactgtgcgttggaactggaacgtcagggcgtgctggccgagtttggcgtgaccatgattggtgccaccgccgacgccattgataaagcagaagaccgccgtcgctttgatatcgcgatgaagaaaatcggtctggatacggcgcgctccggcatcgctcacaatatggaagaagcgctggccgttgcggctgacgtgggtttcccttgcatcattcgtccgtccttcaccatgggaggcaccggcggcggtattgcctacaaccgtgaagagttcgaagaaatctgcgagcgcggtctggatttgtctccaactaaagaactgttgattgacgaatctctgatcggctggaaagagtacgagatggaagtggtgcgtgataaaaacgacaactgcatcatcgtctgttccatcgaaaacttcgacgctatggggatccacaccggtgactccatcaccgttgcgccagcgcagactctgacggataaagaatatcaaatcatgcgtaacgcctcgatggcggtactgcgtgaaatcggcgtggaaaccggcggctccaacgttcagttctcggttaacccaaaaactggccgtctgattgttattgagatgaacccgcgcgtatcccgctcttcggcgctggcatccaaagcaactggtttcccgattgccaagattgccgccaagctggcggtaggttacacgctggatgaactgaccaacgatatcaccggtggccgtactccggcgtcatttgagccctccatcgattacgttgtgaccaaaatccctcgctttaatttcgagaaatttgccggtgccaacgaccgcctgacgacccaaatgaaatcggtcggcgaagtgatggcgattggccgtactcagcaagaatccttgcagaaagccttacgtggtctggaagttggcgcgaccggctttgatccaaaagtcagcctggacgatccggaagcgctgaccaagattcgccgcgagctgaaagacgctggcgcagagcgtatctggtacatcgccgatgcgttccgcgccggtatgtccgtagacggcgttttcaacctgaccaacgttgaccgctggttcctggtgcagattgaagaactggttcgtctggaagagaaagtagctgaatgcggtatcaacggcttgaattatgaattcctgcgccagttgaagcgtaaaggttttgctgatgcgcgtctggctaaactggttggcgtagccgaaagcgaagtgcgcaagctacgctacaaatttgacctgcatccggtttacaaacgtgtggatacctgtgcggcagaattctctactgatacagcctatatgtactcaacctatgaggaagagtgcgaatctaacccaaccagcgatcgtccgaaaatcatggtgttgggcggtggtcctaaccgtatcggtcaggggattgaattcgattattgttgcgttcacgcctcgctggcgctgcgtgaagacggttacgaaaccatcatggtgaactgtaaccctgaaacggtttccacggattacgatacctctgaccgtctgtacttcgagtcagtgacgctggaagacgtgctggaaatcgtacgtattgagaagccacagggtgttatcgtacagtacggcggccagactccgctgaaactggctcgcgaactggaagctgccggcgttcctgttatcggtaccagccctgatgccattgaccgcgcagaagaccgtgagcgttttcagcaggcggtgaatcgtctgggtctcaagcaaccggctaacgccaccgttgccactatcgaacaagcggtagataaggctagcggcttgggttatccgttggtggtgcgtccttcctatgtactgggtggccgcgcaatggaaatcgtctatgacgaaaccgacctgcgccgttacttccagaatgcggtgagcgtgtctaacgatgcaccagtattgctggatcgtttcctcgatgacgcggtggaagtggatgtggacgcgatttgcgacggtgagcatgtgctgatcggcggaattatggagcatatcgagcaggcaggggttcactccggtgactcagcttgttcattgccagcctacacgctaagcaaagaaattcaggatgttatgcgtcagcaggttgagaagctggcgtttgaactgtgcgttcgcggtttgatgaacgtccagttcgcggtgaagaacaacgaagtttatctgattgaagtgaacccacgcgctgctcgtaccgtacctttcgtttctaaagccaccggtatgccattagcgaagattgccgctcgagttatggctggcaaatcactggcagagcaagggataaccgaagaaatcatcccgccatattactcggtaaaagaagtggtactgccgtttaataagttccctggcgttgacccgattcttgggccagaaatgcgttcaaccggtgaagttatgggcgttggccgtaccttcgcagaagcattttcgaaggcgatgctgggcagccagtccggtatgaagaaaagtggtcgtgcgctgttgtcggtgcgcgaaggggataaagctcgcgtggttgatttggctgccaagctgctgaaacaaggcttcgaactggatgcaacccatggtactgcggtggtgttaggggaagcgggcataaatccacgtttggtcaacaaggtacatgaaggccgtcctcacattcaggatcgtattaagaatggcgagtacacctacattgtcaataccacggcgggacgtcaggctatcgaagactccaagctgattcgtcgcagtgccttacagtataaagtgcactatgacaccacgttaaacggtggtttcgcgacggcaatggcgctgaatgcggatccaaccgagcaagtgatttcagtgcaggaaatgcatgccaagattaagcaaatgaaaggttaatctgggtaagcgcaaaattgaaaggcgatggaaacatcgccttttttgtgactgaaacaaagtgaatcaactcagggcgactttaatacccagaccaatcagtaaaccgccgagaaccttatccaccagtttttgtgctttcgccagcccgcgccgaaccggagcgctttggatcaaaatgaccagtattggccaccaaactactgctaatcccaatatgatcgaggcgtaccacagtttttcgccgataccggagttaatctgaagtatctgggtgaataccgcgagaaagaatagcgttgctttgggatttagcaggttgcaaaggtagccctgcagaaaggcattcttcatcttgatagtttgttgtggcaaatggctgatattcattttgctttctccgcgtgagagaagcgcctgaatacctacccaaattaggtagacagcaccggcatatttcaggaaattaaataaccacggggtagtggtaataaccaccgccaggcctgctacgcagtaagacatgtgagtcgccacgccgcaaataacgccaaatgcggtcatcatggcggcagaacgacgatagcgagcggcattttttatgaccagaaagaaatcagggccgggagaaagcatccccaaagtagcgatagtggcaacaaataatgaagtttcgagcatcagggaattccgcaatgtagcagggtaataggtgaataatagcgctgtcccagttccctgacatcaccttaatgggtaagaaattaaaatcaacgtttcactcttttgacaggtatcgatacagaatgatgagccaggagaatgcaatttgtcagggtataccccatcagcagcagcgggagattacccggctatgtatacaatgtgccctgttattgttacagcatggcgcagaaagcatgttggtagaacaactctccgctcgtctggggattgccttgggaatggatagcgttgaaagctcgatctctgctaacgcggtggtattaacgactattagccaagggaactgcctgacctcgacccgaaaaaataccgatcgcggcattaatatgcaggttgtgaccgaagtacagcatattgttattttagctgaacaccgtttgctggatgctcaggatgttgcaaaacgcttagatcatattcggccactacgttatccacgttggctggtggtagcgatggtcgctttgtcctgcgggtgctttagtatgctaaacggcggcggttgggatgccttttctatcacttttatcgccagcggcgtgtcgatgtttgtgcggcaaagtttgacagctcgtcatatgaatcctctgattaacttctgtattacggcattcgttgcgacttcggcatcaggtttgctgatgcgcttacctcagtttgaacaggcttccagcgtagcaatggccgccagcgttttactgttggttcccggattcccgctgattaatgcggtcgcggatatgtttaaaggccatgtgaataccggactggctcgttgggcaatggccagcctgttgacgttatcgacctgtattggcgtggtgatcgccatggcactgtgggggctgcggggatgggcatgagtttattatgggctttgctgcaagatatggcgctggcggccattccggcattgggttttgcgatggtgtttaacgttccgattcgggcattacgttattgcgcactgttgggcgctatcggtcacggttcgcgtatgctgatgatgcattttggtatgaatatcgaattggcgtcgctggtggcttcaatcctgataggcgtgattggtattagctggtcgcgctggctactcgcgcacccgaaggtatttacggtcgctgcggttatcccgatgtttcccggtatttctgcctatactgcgatgatctcggtggtagaaatatcccatttgggatacaccgaggagttgatgtcaacgatggttaccaatttcttaaaagcttcatttattgttggcgcactatcgataggtttatccttgccaggattatggctttatcgtaagcgcccgagtgtataggctttttttccgaggtcagcagtcccatcgctaagagctgtcttatatgtgctgttagcctgattatgactatcgacggctgataaggctttacgtatagtgtgagcaatttttcgggactggctaacttagcctacagggtttaataatgattatcagcctgatcgctgcacttgcggcagatcgtgttattggtatggaaaatgccatgccgtggcacctaccggctgatttggcgtggtttaaacgtaacacgctgaacaaaccggtaattatgggtcgcaaaacgtttgaatctattggtcgtccacttcctggccgtctgaatatcgttatcagcagccagtcgggcaccgacagccgcgtcagctgggcaacttcaatcgacgaagcgctggctttagccggtgacgttgaagaagtgatggttatgggcggagggcgggtatatagccagttcctcgatcgcgcacatcgcttgtacctgacacacatcgatgctgaagttgggggcgatacacatttccctgactatgaacctgatgaatgggaatcttcattcagtgagttccacgatgcagatgaagctaattcacatagctattgctttgagatattagagcgtcgctagtttttaccgaactggattaattcaataggaggcctatatggcctcctttttttatcaaaaaatgcctgtctattattatggttctcgttattaaattagaaaatgccagagttcaatctggttgatatatttatttttcctttcaatgctaattcttactttatataaatgggagtgttaaatgcgaaaaataaatatggtaacgattctacctattattctatatagccacctgttatcagcctctgtcaatcattgcccagagccgagtgaaattgatggggctaatggtatggggttatattttacggcaaatagtcagtggcttggagtatctcaaggcgctgagaataatggaaaagtttctcattttttacgggctacctaccatccttataatagtaacgctgagactataggtattttaactagctgtagctatgcccttgaatctggaactatagatatgcatatgaaagattatgagtcgataaaaaacggtggcttttttgtttctctgaaagggcatgagccttgggtgaagacgtcatcgacgttaacgggagataaattcgtttgtcagtctgatgatgtgaaatattgtacttttgaccggttggattattaccaaatatgccagtttcagacggaaaataatagctagagtaatgtaatgaatactaagaaaggctaactgttaatcactattattttgatctatcttttttgagagtctccgagtgtcatttatttgtcataagtgagacttattatttctatgcatctgcttttatcaattaaaaataagggaaaatacttatggtaaatgaagttatgcaattgaatgaagatcgattgatcaatcgtgcaggacgagaactgcgtgcagataatattgataaaataggtttagttggaattcttggcggcggaatctggcctgcctcaatcgagagcgacagcttcgacaacatgcttcaaagcagtgcggttacggataggaatttttggcaagagtagttcggtgcgcaatgtcattctgaaaaatgagaaatggcacaaataaatacgtgccatttcatcatattaaacgaggttaattagccgctgcgatgctgacgtcagtgcctttttcgcggaaagattgctgagtgaaatagcgcttatcttcccagcgcagcatagtcagcacgcctccccagcaacagccggtatccagcgcgtaaataccttccggagcgcctttcccttccagagatgcccagtgaccaaacgcaatggaataatcaggatcaaccaaccgaggcaaatcaaaccagggttttagcggtgatggcgcattctctggcgtatctttgcagatcatgtccaactgaccatttgggaagcagtaccgcatacgggttagagcattagtgctaaaacgcaaacgagccagaccagatagctcctggctccaattgtttggcatatcgccgtacatggcatccagaaatagtggatagctgtcgctactcagcaccgcttcgacttcgcgggcacaggtttgggcggtttcaatatcccactgtggcgtgattcctgcgtgggccatcaccagtttcaattcctcatcgacctgaagcaccggctggcggcgtaaccagttaatcaattcatcggcgtcttgggcttccagcagcggggtgatgcgatctttgggcttattgcggctaatgccagcataaactgctaataagtgcaggtcgtgattgcctagcaccatacgtacggccgggcctaatgcgcgaacatagcgcagaacatctaaagatgcggggccacgggcgaccaaatcaccggttaaccaaagagtgtcttgctgagtattaaactcaacttgcgccaatagggcgcgtagttcatcgatacagccgtgaacatcgccaatcaggtaggtagacatatttttcggggccggattagtggatcagcgtcgggatagccaaacggaagacgggaattgccgtacggaatgcctggcctaggtgatcaaccatttcgtagtgcccttccatggtacccagcggcgtttctagtaccgcgccgctggtatattggaattcattgcccggaagaatcagcggttgctcaccgataacgccttcaccttgaacttcggtctgacgaccgttgctattggtgatcagccagtaacgaccaaccagctgaaccgttgaacgccccagattgcgaatagtgacggtataggcgaagacaaagcgttcttcatcaggtatcgattgggtttccacatagatactttgtacctgcacacacacacggggccgttcaatcatggcgaactcctgttattcctgcggtgtcgattgcgccgaaagccagttagccagcttacagtattgcgccacagaaatgttttctgcgcgaagcgtcggattgacacctaattcggttaattgctcaggcgtaaacaaatcccctaagctattacgtacggttttcctgcgctggttaaaagcttgcgtagtaatgcggctcagcatacgcacatccccaaccgggttaggcatgttcacatgaggaaccagacgtaccacggcagagtctacttttggcgctggggtgaaggccgtaggtggcacttcaagaactggtatcacgttacaataatattgcgccatgacggttaagcggccataagccttactgtttgggccagcaaccaagcggtttaccacttctttttgcaacatgaaatgcatgtcgcgaatagcctgagtatagctgaacaggtggaacattaacggggtagaaatgttgtacggcaggttaccaaacacgcgtaatggctgacccgcctgttctgccagctcggcaaaatcaatcttcatggcatcttgctggtggatcgtcagcttatcttttagctgcggatggctggccaaacgtgcggcaagatcgcgatccagctcgataaccgtcatgtgatccatacgtgcagcaactggttcggttaacgcgcctaagccgggcccgatttccactaccgcttccccgggaacagggtggatcgcagaaacaatactatcgatgacaaactgatcgtttaaaaagttttgtccaaagcgtttgcgggcaaagtgcccttggtggactctattattcattgctgttatttatcattttaatggctaaatttaatgccgttttgaagctgcccacgtcggcagtgccggtagcagcaagttccaaagcggttccgtggtccactgatgtgcggataaaaggcagaccgagggtaatatttaccgctcgtccaaagccttggtattttaacaccggtagcccctgatcgtgatacatggctaatacggcatcggcatgttgcaaatatttgggctggaacaaggtatccgccggcaacgggccaatcaaggtcacgccttgctgacgcagctcgtctagcgcgggaataatgatatccagctcttcacgacccatatggccgccttcgcctgcgtgtggatttaacccacaaacataaatatgcggctgttggatgccaaatttggttttgagatcccgatcgagaatagtgataacttcgtgcaggttatcccgagttatagcgcgagaaacctctgacaacggtaaatgcgttgtagccagagcgacgcgcagctcttcggttgccagcatcataacgactttttggcacaggctacgctcggcaaaaaactcagtatgaccagtgaaagggacgcctgcatcattaataatgcttttttgtaccggaccggtgaccaaagccgcgaattcaccccgcaagcatccatcgcaggcctgagccagcgtttctaccacgtaggcgctgttactaaccgaaggaacacctgcggtgaccggagcggcggcaacgggcaggatggttaaggttcctgcccgctgggcaaggccagcttcatcgggttgatattcccgcaattgcagagggagcttcaattgctccgcccgttcaagtagcaaggccggatcggcgcacacgactaactcaacaggccagtcctgttgagccagagtgatcaccagatccggcccaaccccggcaggttcgccgggggtaatgacaatgcggttatttttgtgcatcgctaccatcaagaatcttcacataagaagcggcacgttgttcctgcatccaggtttgcgcttcttcagagaatttacggttaaacagcatgcggtaggcacgatctttctgcgccgcatcggttcggtctacctgacgggtatcgactacctgaatcaaatgccagccgaaagatgaatgaaccggcgcactgatctcgccttttttcagtttcatcaaggcatcacggaaggctggatcgtagatgtcgggagaagcccaacccagatcgccgccttgtaccgcagagcctggatcttcagaaagtcgcttggcttcatcggcaaaggttgccttgccgcttttgatatcattcgccgctgcctgtaattttgcgcgtgcctgatcgtcggtcatcacaacggatggtttaagcaaaatatggcgagcgtgcacttctgtaaccgaaacggtttgatttgtgccgcgaatatcattcactttcagaatatggaaaccgacgccggagcgaatcggcccaacaacctgacctttgctggccgtttgcagtctttcagcaaatagcgttggcaattcctgtagcttgccccaacccatttggccgcctttcaatgcctgagaatcggcagagtttgcgatagccaatttgccaaagtccgcgccatttttgagttccgcgaccagattttttgccaagtcttcagcggtatcaacctgctgttgggatggattttccggtaacggaattaaaatgtggctcaggtttaattcagcgtcatcgccggtctgggctgcgatctgtttggccagtgattcgacttcttgcggtaaaatggtgatgcgacggcgaacttcgttatttcgcacttcggaggtcagcatttctttgcgaatctgggcgcggtaagtgttgtaatctaacccttcagcggccagacggctgcgcatttgtgccgttgtcatacggttttgcgccgcaatatcagcaatggctttatccagcgcttcgtcggaaacggtaatccccattttctgtgccatctgcaattggatattatccataatcaggcgttccagaatctggtggcgcaacgtgccttcgtcaggaatttgctgaccagcctgttgcgcattgagttttaccgactgtaacaaaccgtcgacgtcactctgcaagaccacaccgttattaaccacggcggccactttatcaacttcttgtggtgctgcgaacgcggtattggcaccgatcaccaatccgagaataagcgttctccagttcttcataccttttccattatgtaatccgcagttgcgggtttaaattcactgaattcagtgtgttactcagtatcagaatgcgctttggtaaggcaggataccagagcgtaacatctgttgggtacccaaactgtggttgctgcttaaaccacgtaactctatgttaaacgagattttgttatcatatttactggtattgtccagcgtgttccagccgttgattttacgctcatagcccagattaatcgcccaacagcaggtattgtactgtaccccaaccagttggctagccggttgattggccttagtgtcgtaatagtatgacccgacgatagcccaacggtcggccaacggtaaactggccactgcacccacttgagaaataccttcctgatagccctggcttctcaccttaggtaccgccgcctgaatatattcagggctggcgtagcggtagttcaactgaagcaccgtttcggcattgtggcgatattccatcactgtattaccctgagtcagacttcccaagcgggtatcgtactgcgctccgcctctaaagccccacttatcggtaattttccaataggtgtccccggcccataccaggctaccggtatcattgctgttgtcgatattggctgagtttttattattatcaccggttctggaaggggtgaaataatagatttgacccaaggaaacgttaaaacgttcaaccagcccatcatcataaatgcgagaagttaaaccggtagcgatctgattggccgatgcgatgcgatccaacccgccatatgtacggtcacggaacaggccggtatagtcagtttgcagcagagtggtgtcgtaaagatagatgtcatcctggttgcgataaggcacatacaaatattgggctcgtggctccaaagtttgcgtatagccttctgcccaatccatctggcggtcaaataccacttttccatcgactttaaactgtggcagaacgcgattgactgaatcttgcagttctggagccacaccaccgttattcgccacataattacttgaaaaaccagtgggaatatcttgctgatagtgagttgccatcagcttgatttcggtattcaggctcgcccaatcgttcgccagaggaagattgattgatggctcaatatggaaacgatccgccttcggattattcggattcacgctggtgaatttaactgcttgcccatacacccgcatatcgaacgggcctacatcgtttttgtaataattgagatctaactgcggctgggcgcggtaggcatttgagtcaccgccaccattggcgaatacttggaactgtttggatgacaatgtagcgtcccagtttttctgcgcatagcccacgctaaaaatttgcgtggcgtagccgtcagtactggaaccataaagtgaagtgaagtctctaaagtaagtcggatcgctgactttggtatagtcgatgttaaagcgccatacctgatccatgacgccagaatggccccagtagtagagccaacgagctttatcattattggctttgtctgcgctggcatattcgcggtcgcttgatagccagtcgaatgccatggtaccagcaccgggggctagcaaatagcggaattcgttctggaactgagtgccgcgtttctcaatgtagtgaggtgtaatggtggcatcaaagttcggcgcgatgttccagtagtacggcaacatgaattcgaagccgttattggtgctgtaacgcgcattcgggatcaggaaaccggagcggcgtttatcgccaacgggcagttgcatatatgggctatagaaaaccggtaccggcccgattttaaagcgtgcattccagatctcggccacttgttcttcgcgatcatgaatcacttcgctacccactacgctccagctgttatcaccgggcaggcacgaggtaaaagtaccgttttccagaatggtatagcgattttgaccgcgcagtttcatcagatcggcatcaccgcgaccctgacgccctaccatttggtagtcgcccttatccatattggtgtctttggtgttcagatttgaccaggcttttggccctttcagaataatctgcggatcgtcgtaattgacatcacctatagcggtgacggttcgcaccggaatcggctggccgggttcctgtgtctggtgtaactgaacctcattggccgttagggtgctgttaccctgctggacattaacgttaccggtgaaaaccgcactgtggggataattgccttcggttttatccgcttggatatgcaccggaagctggttggtatcgcccgtaaccagcggtttgtcataggtaggaacgccgaacatgcattgttcagcgaggtcggccagcgattgctgactatagagtgccgtccatatcaacgtggccagcagtgttgggaatctttttttcatacgcgcttttggtgttccgtcatcaggggcaacgtgccggcaaacggtctgagactatctcactcatcagagttgcgctagtgttaaatccggccgtttacacgtctcgccgttaggcacagagctaaatgccgagtatgataatgcaaaatttgactgacggcatgatgaattgaggagtatatgcagtattggggaaaactgctcggtctgatattgggattgatgtccggtattggtttctggggtgtagtactggggttgatcgtcggccatatggtagataaggctcgaaccgcgcgacgccgcggctttttcgtcgatcagcaaacgcgacaatcactgttttttcgcaccacatttcaggttatggggcacctgaccaaagccaaaggacgcgtaactgaagttgatattcagcttgccagtcagttgatggatcgtatgcaattacatggaaatgcccgcacggcggcgcagcaggcgttccgtgaaggtaagcaaagcgacttcccattgcgggaaaaactgcgtgaattgcgcagcgtttgcttcggtcgtttcgatcttattaggatgtttctggaaattcagttacaggctgcttttgccgatggttcgctccatccgaatgaacggcaggtactgtacgttattgccgatgagctaggtatttcccgcagccagttcgatcagtttcttcgcatgatagaaggtggtcgtcagtttggtgggcagggtggttactctcaagggggctaccagcaggcaccgcaagggccaactctggctgatgcctgtaaagtgctaggcgttaatccgagcgatgatgccgttgccatcaagcgtgcttatcgcaaattaatgagcgaacatcacccggataaattggtcgctaagggccttccgccggaaatgatggaaatggctaagcagaaagcgcaggaaattcagtccgcttatgatttgattaagcgagaaaagggatttaaataagatcggatttttattgagatgcttatcgataaaatttgcggtcgcaacttttgtgccatttcattcgatattaaggaaggtaggacgccttccttaataattcatcaaacacgatacttactttaccgttactcatcacttaaaaatcggcttcactgcggaaatgcataggcgtgccgaattctggatgagtgatacataactcctgggcatgtagctgtaagcgcggagccatcgccttggcctctggaggggcgtagaagccgtcgccgaggatagggtgccccatcgccagcatatgtactcgtagttggtgcgagcggccggtgatgggcgataatttcacccgagtactgccgtctgcatcccgggacagcaccagatactcagtttgtgcagatttaccggtttcataacacactttttgcttcggtcgattaggccagtcgcaaatcagcggcaaatcaataaccccttcgtcctgcgccagatgtccccaaactcgtgcaatataagattttttcggctcacgttcgcgaaattgacgctttaattcgcgttcggcggctttggtgagtgccacgacaatcacgccgctggtcgccatatccagacgatgaacggattccgcagccggaaaatcagcctgaatacgcgtcattacgctgtctttgttttccggtgcccgtccgggtaccgaaagcaacccgctcggtttgttaaccaccataatatgctgatcctggtacaaaatatgtagccagggatcgcgcggggggttatagggttccatgttcaatccgttaccaccttgctgcaattcgaggttttttcgatatggcatatcagtctggataaaagagccggaggttgccggctctttcttacacaaaagtgttactggtgagtgaccacaaccaagcggattgcgtcaagacgccagccagcctgattcaggttttccagcaccattttgcggttatgctccagcgcttcgagttcgtcatcacgaatattcgggttaacggctttcaacgcttccaaacgtgccagttcggcactcagcttttcatcggcttcttgcttggcggtttcgatcagcgctttcgcctgttcttctaccagcgcttccgcctgttgcagcatggcgtgaacctcttgctgaaccgcgttcaccagcttgcttgaggtgtggcgattgaccgcattcaactggcggttaaagctttcaaactctacctgagccgccagattggtgcctttgcgatccatcagcatacgtaccggcgtcggtggcaggaagcgggtcagttgcagatgcttaggtgcctgagcttctaccacataaaccaactccgccagcagagtacctactggtaatgctttgtttttcaacagagaaactgcacagcttccggtgtcgccggacaaaatcaaatccaggccgttgcgaataatcgggtgttcccaggacacaaactgtgcgtcttcacgggataacgcctgatcgcgatcgaacgttacggtgcagccatcctgcggcagaccagggaaatccggtaccagcatgtggtctgatggcgttaatacgatcaggttatcgctgcggtcttcctgattgatgccgacaatatcaaacaggttcagcgcaaagcttaccagattgatgtcgttatcctgattggcgatagcctcggccagttcctgaccgtgttcgccaccgtttgaatgcatttccagcagacggtcacgaccctgctccagttgttgcttcagtttgtcgtgctgctgacggcaggtgtggataaattcgtccaaaccttcctgttcggctggcgtggccagatagccgatcaattcctgataggcgctgtcataaatggttcggcctgtcgggcaggtatgttcgaaggcatcgagaccttcgtgataccagcgcactaaaatcgcctgtgcagtattttccagataaggcaccatgatttgaatttcacggttctggccaatgcgatccagacgtccgattcgctgttccagcagatctgggttaaacggcaaatcaaacatcaccaactggcaggcaaactggaagttacgcccttctgagccgatttctgaacacaacagcacctgggcaccgtcttcttctgaggcaaaataagccgctgcgcgatcccgctcaatcagcgataaaccttcatggaacacggcagcgcgaatcgcctcacgttcacgtaagacctgctccagttgcagcgcggtggcggcctgagcgcagataaccagcactttctcatcgcggttggcgatcaggtagttcagtagccattcaacgcgaggatcaaaattccaccaggtggcattttccccttcaaattcctgataaatctgctcgggataaagcatatctttggcgcgagcttccagcgatttcttcgcacccataatgccagagactttgatcgccgtttgatactgggttggcaatggcagttttatttcgtgcagtacgcggtgcgggaaacctttcacgccgttacgggtgttacggaacagaactcggctggtaccgtggcgatccatcagcatgtcgactagctggcggcgcgccgcttcgctgtcttctccgtcgctgtttgccgctttcagcagcggttcgatatcctgctcggcaatcatttcacccagcatattcagcttgtcgtccgccagacgctcgccgcccagcagtagcgtcactgcgtcagcgataggacgatattgctgttgttcgctgacaaaatcttcgtaatcgtggaagcgatccggatccagcaggcgcaaacgggcaaagtggctctgttggcccaattgctcaggggttgcggtcagcagcagtacgccagggatattttccgccagttgctcaataacctgatattcgcggctcggggcttcttcgctccaggccagatggtgggcttcatccaccactaacaaatcccaggatgcgtcggccagttgctctaaacgttgcttgttacgacgtacgaaatctaatgagcagataaccaactgttcggtttcaaatgggttgctgctgtcttgcatcgcttcggaataacgactgtcgtcaaacagtgagaagcgtaggttaaagcggcgcagcatctcaaccagccactggtgttgcaggctttccggcaccacgatcagcacgcgctcagcgcgaccagccaataattgctgatggataatcatcccggcttcaatggttttacccaaaccaacttcatcggccaacagtacgcgtggagcgtgacgctgaccgacttcgtaagcgatatgcaactgatgaggaatcaggctggcgcgaacgccgcgcagaccgctccacggtaaacggaactgctcgctttggtatttacgagcgcggaaacgcagggcaaaacgatccattcgatcgatctgaccggcgaataggcgatcttgcggcttgctaaaagtgagtttgctatccagcaacacttcacgcattgctacgccggtttcctcggtatccaaacgggtgccgatataggtaatcaatccgttttcgtgggtgacttcttccactttcatttgccagccttcgtggctgctgatggtatcaccggggttgaacatcacgcgggtgattggagagtcatttctggcatagaggcggttttcaccggttgcagggaacagcaaggtgaccatgcgtacgtcgatggctacgacagtacccagtccaagttcgctttctgtatcgctgatccagcgttgaccaagtgtaaaaggcataaattatcggctcgattttgggttgggcagttatttgtttaactagtctgtgtgtttgataaggttggctttattcactataaatttaattttattgtcgacgaatgacgccaacccttatcaactaactggcaatagtttaccgtccgcgcaggctgatggcctaagaatctgcctgaaaaaacgtgacaacctgtgtgacgtaggtggcagagtccgtttgcacggataaataacgacattatgattgatgcgcgatttggcaagggcgctatggtaatggaaggcgcgcccgtcgtcacctgtaaaaccacggaaaagtgattaaaaaagtcccatttgaccagtaatcaacgttgtaaaatcatcctgcagaaagggtagtatagcctcggctacgggttgtagctggcgggagaggtaatgatcgtaatcaatgggggaatgacgaatttccagcggctccgggccagacgtggtcatcacatagctgatccagccgccgttttggtattgcaaagggcgtccttgctgacgattaaactcatcggccagacgagccgcacgggcatgaggtggcacattgcgctgataatcatccagctttcttcgcagccgtttccgataaaccagcagatgatccagctcgccgttcagggtttgcgccacgtaatcgcgaatgtagtcctgatagggttgctgttggaatatacgttgataaagttcttgctgaaaagtctgagccagcggcgtccaatcggtgcgcacggtttctaaccctttgtacaccatacgatcgccttcgggcgtggtgaccaatccagcataacgttttttactgccttgctctgcgccgcggatggtgggcatcaaaaagcgccgatagtgagtttcaaactccagttctaatgcgcaggacaggccaaacgtctcgtgcaaatgtcgttgccaccatgcgttcacgtattccaccaattctttgccaatctggctggcttgctcgtcgctatgggcgtgtttcagccagacaaaggtggagtcggtgtcgccgtaaatgacctgataaccgcgatctgcgattaattcacgcgtttggcgcatgatctcgtgaccacgcagtgtgatcgaagaggccagccgaggatcgaagaaacggcagccgctggagcccaatacgccgtaaaacgcattcataatgattttcaacgcttgagataacggcttatttttctgttgtttagcggcttctcggccttgccagatttgtttaacaatggcgggtaggcagtgtttctcgcgagaaaaccaggcgttgcgaaaaccgggcactgaatgcgcaagcgttggctgatgcatgccttcgactaagccaacaggatctatcaggaaagttcgaataatcgacgggtacaggcttttgtagtccagcaccagcaccgagtcgtacaaaccgggctgagaatccatcacgaagccgccggggctatgttcttccggtaactcccctaaattcggcgcgacataaccggcccggtgcatgcgcggcaaatacagatgagtaaaggccgcgaccgacccgccgctgcgatcggcggccagaccggttacgctggctctttccagtaagaagctgagcaattcggttttggcaaaaatccgcgttaccaactcgcagtctttcaagttatagcgcgctagcgcaggtttatcctcagcaaagcgacgattgatttcatccattcgttgatagggggaatcgctatctttgccttcgcccagcaaggtttgcgcgacggattccagactgaaagagggaaaattccaggtggctgatttgagcgcttcaatgccgtcgataatcagccgcccagcggctgaggcaaaaaagtgcccctgtttaaaaccgtgctcgcgccattccagtgggttaccgccacgaccaaaacgcagtggaatctgatagcgatccgcatgtttttgcagtacccgcagatcaaattgcaccagattccagccgataatggcatcgggatcgtattgttccagccattgattcagtttttccagtagctgcggacggctggcaacgtattccagattgaaatccaacggttgctcatccccattttgcggccccaacatataaacttgacgctggccgcagccttccagtccaatactgtacaactcaccgtgctcgctggtttctatatccagagacagcagttttattggtggacgataatcttcggctggtttcattcgggtggacaataacgtgccgtttttatccggtagtccgctaaaccacactggtgcggtaataaaacgttccatcaggtagcgttccggcgggcgaatgtccgcttcgtagacattcactccgccttctttcagcagcttttccagccgcatcagctgacgatgttgttggcaatacagccctaaaaccgggcggcggtgaaaatccgtcagggaaagcggccgtaactgatagcggcgctcatcccgcaggatttgctctgccaacggcgcttgctctgcgggaataaaggccacggaaggctgaggcggcagccgaaccaactgtggcccattatcggttgccaaccagaattcaacttcagtgcctgccgctgtatcccgccaatggcgggtgagcaggaaaccttggcgcgcttgatccaccggattacctttaatgaatgctacctttaattcatgatgctatgaatgagtgttaactgccgtgtcttttagtatggttttttatacagtcattgtctatttgaatggttgccagatagcttccgtatgtttccaatagatttcgtcgcaaacactcaatcagttgaatcacagtgaattcagcagcagtacggaaatagcccggaaaaaatcattgattgacgggactatgaggtagctggacaatccctcgcgctttatacaatggataaatttatggaagcctatttagaacaccttttgacacaatcactggctttcacgctatttgtcgtcatgtttgtcacatttatcgaatctttagcgctggttggccttttgttgccgggaacggtgatgatggcgagcgtgggggcgttaattggaagcggtcaggttggattttatccggcgtgggcggcggggattgtcggttgcctgttaggagattggatttcctactttatcgggcgggcgtttaaacagccgctgcaccgttggtcatttctgaaaaagcataaaactatgctggataaaaccgagtatgcgctgcatcagcacagcatggcgacggtgttgatcggccgctatattggccccactcggccattggtgccgatggtcgccggtatgctggatctgccgccactaaaattcgctttgccaaatattattggttgcctgacttggccggcggtgtatttcttccccggtattttggctggagtggcgattgatatcccgcccagcgccaatagtttcatgtttaagtggctgttagtcttagtggcggtaaccgtttggctggcgggatggttgggctggcgctgggttcgctacggcaagcgtaagccagatcgtctgagtcgttggctgccgctggcgcgtttacgcgggttaaccatattgatgacgctggcggcaatcggcagctttatctggctgcacgtacagccgattatgccgatttaccgccatttgctgtggaaagtgttagccggttaaagttgaggtaatgcccagtacgcaggcctcagccaccgaaccttccaccaatgcctgagtcgggccatcgtaatagatgcgcccgtccactatcagtaacgttcgttccgcaatccgcgcggcatcgtccagattatgggaaaccataagcaaagtcagttggcgacggtcgcaaacctgttccagcagttgcagcatttcggtgcgtaatgccggatcgagtgcagaaaatggctcatccaataacaggatcggctggctgcgaaccagacaccgcgccagcgccgctcgttgccgctggccaccggaaagctgtgctggcaagcgatccagacagttctccaatcctacctgttgagcaatttgctgcaataactggcgttgttggttattcagctttaatcccggatttagccccagcccgatgttttgctcaactgtcaaatgtgagaataaattgttttcctgaaacagcatggaaaccggtcgcttagctggagggctaccgctgtgctcttggttattcaatagcatacgaccactgactggcgtaaggaacccggcgattaggctaagtaaggtgcttttacctgctccgctggggccaagaatagccacgcgctcgcccggattaatttgcacatcaaagcgcataggcaagtggtcatataaataggtaattttctcaagctttagcatggcggcccggcaatttctcaataagggtaaacaggaggaaacacaataacagtagcagtagggcggttaccgcgccgtcgttgctgcgataggcaccaatttgctgataaagatagaacggcagggtacggaaatgctcgttgccaaatagcgcgacgacgccaaaatcaccgatagatatcacgctggcgaaggcgagtgcctgagctaatggacgttttaaggcgctaaattccacccagcgcagtcggtgccaaccacggatatccagcgacaggcatagcgggccgtagcgttcagccaaatcgcgcatcgggttatccagtactttcagcgcataaggcactgcaatcagcgcgttggtgagaatcactagcgcgtagggggattggggtaaacctatggtgtcattgagcaacaggaagaaaccggtggctaaaacaatgcccggcatcgccaatatcaccattccgctcatttccattgcctggccgaataccattttatctcgcaactttaactctcggctgctccacagcaacatcatggtcagcagtacgcagagcaatccagcagccacggcgatagtcagcgaggtcgttaaagcctgccatagcgccggttgttgtaatacgctaaatagggttttattagtgccgtcaatgaccactgccagcagaggtggtaacagcaataatagcgtgccgatgatgagtacgctgtcgctaacccgttgccacaggctgtcttgcgggttacgccagctttgagcatgagtgtttcccaccgctagcgcgctatttagccgctggctcagtagcaccaaccccagacagcaaccgagctgaatcagcgccagcagcgccgctcggcctaaatcgtagtcgtagctaagcgcctgataaatagccagctcaatggttgtcgcctgtggcccgccgccaagagacagcacggtagcaaaactggcgaagcacaacataaagatcagcgcggcagtaggcagaatctggcggcgcaaataaggccattccacccagcggaaatgctgccaaccgttcattcccaactgagcggccaattggcgctgttccaccgcaatactttccagtgattgcagtaacaggcgggtagccagcggtagattgaaaaagacatgagccagcagaatgccttgcaaaccataaggggaaaaatggtaatccagccctagccagccgaaaagttgcgctaaccagccttggcgcccatagacgctcaaaataccaaatagcgccaccaataccggcagaactaaggtcatggcgcataatcgcagcaacagttgacggccgggaaagcggcggcgatacagagcgcgagccagcagaatagcgggagccaccgagaacagggccgataaaaaagcctgccagaaggtaaagcgcaccacgtgccacaaatagctgtcctgccatactccgatccagtcggcttctggggcatgacgccagatggcgctaaatgccagcagcgccaccccaaccagcaggaatgaagcaactagtcccgggcagagccaagcggggattagcggctgacggcggattgccatgcctgaatccatttgctgcggttatcggctacttctttcgcgctgaattccaacgcttttttgggcacggtcagagtgttaaacccggccggaagatccattttaatcacgggatacatccagtttccggtaggaatatggttttggaaagccggagaaaccataaactgcatgaatttctgcgccagctccggttgtttgctcgaggctacctgcgctgcgacttccacttgcaaataatggccttcactgaaatcagcagcagcgtattgatctttcttttcttcaatcaaatgataagccggagaagtggtatagctcatgacaaaatccgcttcgcctttcaggaacaggccataggcttcactccagcctttggtcacggtcacggtttttttcgccagtttttgccatgccagcggcgcttcgtccccgtagactttctgcatccataacagtagccccagccccggcgtgctggtgcgcggatcttgataaataaccttccacggcgagtcattttcgatcagttcatgcagacttttcggcgggttttttattttttccttgttatatacgaaggagaaatagccgtagtcatacggaataaatgtgctgttatgccaggcttcggggagcgccagcttgctggtatctatctgacttggcgtaaataatccggttttctctgcggattgcaccaggttgttatccaaccctaatactatgtccgccggacttttctttccttccattcgcaggcgatttaacagagaaacgccgtcttccagtgcgacgaatttcagctcgcagttgcattctgcttcgaaggattttttgatagcaggacccggtccccaatcagcggcaaaggaatcgtaggtgtaaaccgtcaggacaggtttggtggcttcagccgcggtggcggcggctgaaatcagcagcagacagggaagaattcgtttaaacactttgcactcctcaaaaagaaaggtggcaaaggtatctgaggcattggtcaatatccgcaagttcatcatattgctgaatgacgctctcaaatcccttcgccggtattaaccggatcaggttcgacgggtttactctcagcgaatattggccgcggtttgccgctaaacaatttttcgcaccccgttgagacggcgctattgtagagggatagccagactagtgaaagtctgtttattcctccggcggcgtaaaccaggccgatttgaaatcaaaccagcctagggtattcatccgcacgccacgcatgctgtgctgtccaaacaattctagccagtgatggaataacgggtgaaattgatgattgctgaccaatcgttggctccattccgccatgggcaaccggttattgcgccactgcgcgacgtcttgatacaactcttcactcaaacagtgttgcaaaagaggaagttcatataaggtggcaaaaatggaaaattccaccggcagatagaagttggcgctacctagccagatatcgcttttggcttccccccgataccagctggcgtaatccagttcttgtaccaccagtttcacgccttgcgcggccagtacgtctctcagcgtttggctaatggcgttgaattcaggatgttcggtaaaacaggttacggtgagctcagttaattcgaggggtttggcagaaggtgggttcagacgattatggtgccagcgcggcaaaataccgtaggctggcgaccagtagcgctgatacaacgcatcggcatggctgagtaaagccaccggtgtgatcagttcacatagccagcgtctcacgtccggttggctggtgagcggggagcgttgatcgaaaaggagaaagtagcagccttcttccagccgactttccaattcgttgcggctggtatcatccgcctgtaaatgaacgccagaagacactaaatcttctgacaattcaggtaacacccaaatattgacctcatcaatgagtgcgcgaaaaccgaagtagttatcgaaagcctgaattttaaattgattttgccggttgcgaatcaccgagtaagggccggtgccgataggataacgcgaaaaatcaggtagttcaggccattcctgcggcaaaatcatggcgtgaacgctgcccagtagccaagggagccaatagtctggcgtattaagttttacatcaatgacataaggcgtaggagaggtgatttccgtgatgtgggaaaacagcggctgtgtggtcaaacgctttaatgacgtaatcacatcctgcatttctaattcacggccgtgatggaagtgaatcgctggacgtaaataaaagcgccaatgcaagggggttagcgtttgccagtgatgagataaatctggctcggcttccccattttcctcatttatgcgggttaaaccattaaaaatctgccggacaatatgggtttctgaacggcgcagagcggaaccgggcaataggttttgtagttgacggtagtaaagcactctaagtatatgtttaccttgtctaaaactcctccctagctgtgaaagaagcatctggcgaaccgcctgtttatctcccaccaattgcacgagctgatcgatatgatcctgctccagcaactcctctgcccgttgctgttgcagggccagaccggtgtacaaaaaggtgagctgcgagcgttttcctcgaccagcctctgcctgccagcttagccaacccgcttgctgcatattacctagtaacgaacgaacgtggcgacgcgagcaatttagcacttccgccaattgttgcagggtggtttccgtcggtttaccgccgtaatgttgccacaaacggatgaactggtgttgcaggcgagaagtagacataaaagaggaactccacggcaaaatgcatcaatttatctttccctatattacgcagataattatcagtaatgaaaggggaggagcatgatgaaaaagtgcttaaccagacagttttatcagcgctattttagacacgtcagacagcagcaggccgattggttgagctgggtaccgatggaatggcggttaaggatgctggcagatgtcacccaatgggacattcagcacatgccggaaaaagaataccgcaaacatatttagttcgaaccgggttagtaccgatggaatttggatttaactttcatcgttcggcagggacgctgcctattatcaaaaatttctgagtaatggtgcaattcaccagccagtggggcaacctgctggcttttttattgccgagtaatttttatctatagagttattgttgctgttcaccgcaatgtgccttctgtagcatatgaatctaaagtggtttctggcgatggagcctgtaatgaaatctgctctgacgtattcccggcggattaatcccgtctttattgctttttttgtggtggcttttctttccggcatcgccggtgcgctgcaggctccaaccctcagtttgtttttaactacagaggtcaatgtacgccctctatgggttgggcttttttataccgttaacgctatcgccggaattacggtgagctttgtgctggcgaaacgctcggatctgcgtggcgatcgccgcaagttaatcatgctgtgctacctgatggcggtgggtaactgcctgctatttgcctttaatcgtgattatctgaccctgattaccgctggcgtgctattagcctcagtagccaatacggccatgccgcagatttttgctttagcgcgggaatatgccgataactcggcgaaagaagtggtgatgtttagctcgataatgagagcacaattatcattggcttgggttattggcccgccgctatcgtttatgctggcattgaactatggcttcactttgatgttcagtgttgccgccggaatatttgtattaagcggtatcctggtatggttcttattgccatcggtaccgaaagctgaagtgccgaaagacgcgccggtagtgattaatgcaaagctttttgccgataaaaacgtgctgttgctgttcattgcctcgatgctgatgtggacctgtaacaccatgtatatcatcgatatgccgttatacatcacttcagatctcggtttgccggaacgtttggccggtttactgatgggaaccgccgctgggctggaaatccctattatgctgctcgcgggttactcggttaaacgctttggtatgcgtaaaattatgctgtttgccgtggccgcaggcatcgtgttttatgttggattgatcctgtttaaattcaaaactgcgctgatgttattgcagattttcaacgccgtgttcatcggtattgtcgccggtatcggtatgctctattttcaggaattgatgccgggcagggccggtgccgcaacgacgctgtttaccaatagcatatcaaccggcgtaattttagccgggatactacagggcgtgctgacggagaatctggggcattacgcggtttattggatggctgcgttactggcgacagtgtcattggggatatttagccgagtcagggctatctaaatcctctgcatctttcactccaccgcggtgttactgccttcagtcgtctcggtcacttggttgcgcgccaagtgaccgagcgtagcttgctgaaaattaacgtaaaaattcgggttgctgctgctcataggccgaaatattagcctcgtgctgcaatgtcaaaccgatactgtccagcccattcatcatgcaatgacggcggaaaccatcgatctcaaaggcataacttttgcctccggcgctgacggtttgcttttctaaatccacgacgaactcgataccttcctgactttctaccaactggaataaagtatcaatatccgcttcgcttaaagtcaccggtaataattggttattgaatgagttaccgtaaaagatatcggcaaaacttggggcgataaccaccttaaaaccgtaatcggtcagtgcccaaggggcatgctcgcgagatgagccgcagccaaaattttcgcgcgccagcaaaatagtcgccccctgatagcgcgggtgattcagcacaaattcagggttaggcacctgaccggcatcgtccagaaaacgccaatcgttaaacaaatgttggccgaagccagtgcgcgtcactttttgcaaaaactgcttaggaatgatggcgtcggtatcgacattcgctgcatccaacggaacgaccaaacctgtgtgttgaataaattttgccactatggtgtctccgattaatgtgtggacgcggataaatcgcgcacgtctgcaaaatggccgctcaccgccgccgctgccgccattgcagggctgactaaatgggtgcgcccgcctcggccctggcgaccttcaaagttacggttactggtagaagcgcagcgctcgcccggttccaaacggtcgttattcatcgccaaacacatggaacagcccggcaagcgccattcaaaaccagcgttgataaagatctgatccaaaccttcggcttccgcctgcgctttgaccggcccagagccaggaaccacgatagcttgtacgccctgagctacttttctgccctgtgcgatagccgccgcagcccgtaaatcttcaatacgtgaattggtacaggaaccgataaatactttatcgataggcacgtcagtcaacttaatgcccggacgcaagtccatataagccaaagctttttcagccgacgcgcgctcaaccggatcgctgaaagactcaggtgctggaataatctggttaacggcaatgacctgacctgggttggtgccccatgtgacctgcggtgcaatatccgctgcgttcaatgtcaccacggtgtcaaatttggcatcggcatcggatttcagcgtgcgccagtagatcacggcgtgctcccaattcgcaccggttggcgcaaactggcggcctttcaggtagtcaaaagtgacatcatccggcgcgaccaaacccgctttagcacccatttctattgccatattgcataaggtcattcgaccttccatgctcaaggcttcaatcgcgctgccgcagaattccactacgtgcccagttccgcctgcgctaccggttttaccgatgatcgccaatacgatgtctttagcggtaatacctgcgccaacttcaccgttaacttcaattttcatggtcttggcgcgaccctgcttcagcgtttgcgtcgctaaaacatgctcaacttccgaagtaccgataccgaaagccaaagagccaaaggcaccgtgagttgcggtgtgagaatcgccgcatacgatggtcattcccggcaacgtcatgccttgttccgggccgataacgtggacgataccttggtaaggatggttcaagtcatataaagaaacgccaaattcggcacagttcttgattaattcctgcatctgaattcgcgccatttcaccgctggcattaatgtctttggtttgggtagaaacgttgtgatccatggtagcaaaagtcttacccggctgacgtaccggacggcccatagcacgcaggccgtcgaaagcctgtggtgaggtgacttcatgcaccaaatgacggtcgatatacagcaatggcgtttcgttcggggcttcacggacgatatgcgcatcgtacaatttttggtataaggtcttggccatgttaaatcccctcagcgataaaggatgcgatgatatcgcccatttcattggtgccaatagcttccccatcacccgccaaatcagcggtacgatagccttgttcaagcgccagattaactgcgcgctcaatggcgtcggcggcatcgtcttcgcctaaactgaagcgtaacaacagtgatgccgataaaatttgcgcaatcgggttggcgatatttttcccggcgatatccggcgcggagccgcccgctggttcatacaaaccaaagccctgctcgttcagactggcagagggcaacatgcccatagaaccagtaatcatggcgcactcatcggataaaatatcgccaaacaggttggaacacagcaatacgtcgaactgggatggatctttaatcaactgcatggtggcgttgtcgatatacatatgggacagcgcgacgtccggataatctgcggcaatggcattcaccacttcgcgccacagaatagaactttgcaatacgttggctttatcaatcgaagtgactttactacgacgcttgcgcgcggattcaaaggcaatacgggcgattcgctcaatttcaaaacggtgataaacctcggtatcaaaggcgcgctcatacatgccttggccgtcgcgacctttcggttggccgaaatagattccgccggttaattcacgtacgcacagaatatcgaagccgcgggcagcaatatcgctgcgcaatgggcaaaactcttccagaccctgatacaaacgggcagggcgcaggttgctgaataacttgaaatgtttacgcaaaggcaacaaagcgccgcgctcaggttgttcgtccggcggcaaatgttcccatttggggccgccgacggagccgaataaaattgcgtcagcctgctcgcagccgttaatggttgtcgtaggcaaagggcaaccctgacgatcgatagcagcaccgccgacatcataaacgctggtggaaattcgcatgttaaagcgctggcggactgcgtctaacactttgtttgcctgtgccatcacttctggaccaatgccgtctccgggtaaaacggcaatatgataaattttcgtcatgttcacaccatttcctgagtattttgttgcaagcgctgtttttctatttctacctgctgagcgcgccagatgttatttaatacgtgaaccaatgccttagcggaagattcaacaatgtcagtggccaatccgacgccgtggaaacggcggccttgatgttccaccacgatatccacctgacccagcgcatctttaccctgacctttggcagataattgatatttcactaattcaatcggatattcggtaatgcggttaattgcctgataaacggcgtctaccgggccgttgccggtagcagcttcggattttatttcttcgccacacaccaatttcactgacgccgtggccatcacgctggagccagattgaacgctgaaatagtccaaacggtaatattccggttcttcctgttgtttattaataaaggccagagcttctaaatcgtaatcaaatacctggccttttttatccgccagtttcaggaaagcgtcatataaggaatccagatcgtaatccttatcctgatagcccatttcttccatacggtgttttactgcggcgcggccagagcgggaggtcaggtttaactgaacttctttcaagccaatggattccggcgtcatgatttcgtaattttcacgatttttcaggacgccatcctgatgaataccggaagagtgagcaaaagcattgctaccaacaatggctttattgccaggaattggcatattgcataatttactgaccaactggctggtgcggtagatctcctgatgattgatattggtatgcacacccagcatttcgtggcgcacttttatcgccataatcacttcttctaatgaacagttaccggcgcgttcgcccaaaccgttaatcgttccttcaacctgacgcgcaccagcctgaacggcggtgatggagttcgcgaccgacatacccaaatcgtcgtggcaatgaactgaaataatggctttatcgatgtttggaacacgatcatacaaattactgattattccgccgaactgataaggcgtggtgtaacccacggtatcagggatgttgatcgtggtcgccccagcgccaatcgcggcctcgacaatccggcacaagttatcgattggcgtgcggcctgcatcttcacaggagaattcaacgtcatcggtataatgacgagcacgtttgaccgagtgaacggccatcgccataacgtcttcaaacgtgcgctttaatttggattcaatatgtaacgtcgatgtggctaaaaatacgtgaatacggaaagcctcggcgatacgcaaggcttcggcggctacatcaatgtctttatcgacacagcgcgccaaggcgcagactctgctgtttttgatttcacgggctatggtatgcaccgattcgaaatcgccaggggaagaaacgggaaagccaacttccataacatcgacgcccatcctttccagcgccagcgcaatctgtaatttctctttcacgctcaggctagcctgtaacgcctgttcgccgtcacgcaaggtggtatcgaagataatgacttgttggctcatcgggtaattccttatttttctgagtaacttttttatttagcgcgcgacgggtaaaaaaaaacccgcgcatttgcgcgggtttctgaatcttgatggctgaatcagttctgatttccgtccaccaacataccgcgcaagtaagatgcgtttagtagtaggcctagtagacggttggagtagaacataattatcagtttctcatcggttaattgtttcgcttcctaatttgatacgttatttcaacaggagtgtcaacttttgtttgaagtggcgacttaaactggtttgaggtttttgtgcgtcttgtttttagcattaaatactatactgattaatattttggatttatattttgcttggttgtttttggtgttattgattgtttcacgagtgtgattaaaagtgggtgattatgcttaacattaatgctccgttcgattcctgcctcttagatgaatagttaacctttgtttaagtaaaattatcctctgacaaacttgataaggtggataaaaatgacagatagcattaatgtaataaggcatcttacgacgtccgctattagcgttacttaattaccataaatatatttatatataatgagagttagcatacacagcgtttatatttgtcaacctttagtttattaattcacacttaatgtttattatgtcaatgtaaaaaacttaaccatttaactgttgttagcttattttaagaactaataaggtttaatttatgaaattattatttaataatggcatgattatgaatcattgtatcttataaggtgagtgtttgtatgtcacttggaggttaatcatcacatttctggaaattagtgattccagtgataacatgccacgttccactttttatttatctatggaaactattctgacaataggatgcgttagatgtgatacgtggtttcacattttatacaaggacgagactcagtggttatctttcctaacgataacaattgagatcattggttatattaattgtgagacatctaatatatcagtaattaacttactgctgttaaaagatagtcatacacctaatagaaccatctgcataaagcttagtggagttaagcatgtctgaacacaacttggtaactgcaaatccagtaactcaaaaagaatcgtttgatgtccatttgcgtagcgttgatcttaatttactcacggtttttgatgccgttatgcaagagcagaacgtgacccgcgcggcgcaatctttggggatgtcacaaccggcggtcagcaacgccgtagctcgtttaaagctgatgtttgatgacgaactctttttccgtagcggtcgaggtattcagccgacagtccgagccaaacagctgtttggaccggttcgccaggcattacaattggtccataatgaattgcccggcgttgggtttgagccaaaaagtagcgaacgtttgtttaatctctccatttgtagtccgcttgatgttcgccttaccgccgaaatagtggggcgagtaaaacagtgcggcccacacgtacagttatcaattaagtcatacttaaatgatgatattgaacatcagttgcgctatcagaaaaccgactttgtgatcggttataccgaatttgaacggcctgaatttaaacgcacacttttatttaatgatgaattggtattggctgtttcaaaagatcatccgcgaataaacgaatctattacttcagagcaactttttgaagagcaacacgccgtggattctttggataaagtgggttcatttagcaagaactattatgaggctaatgacttgtcccatactatttcctatgaaagcacggatatgaatagcgttcttaacgttgtatctaaaacaaattacgtggctattgttcctcgctggttaattaatatatgtagtgaggaatctaagctaaaacttattgaattaccttgggcgaatactacacgagcctgttatctaacctggcatgaatctaccgatcgcgataaaggtcatcagtggatgaaagccttattaagccaatttagcctttcaatttaaactttattaacggctactggcggtgttactactggggtactatgtacctcagtagttttgttacgtagcggcactcattaaaattttatctccgttattctgtgtttattctcgcaatatttccctcagatgccagtctgccatttgggatagacctcaccaatttcactgaaatccgctgttaaatcagtttcacctcacattcttacgccgaaatttgtttgccatagggctaagagtgagtagactgcgcgaaaaaagtgaacacctgtaagccgaaactttggtcaaaggggagcttcatcctatgctttacgtattcactacatttttttatttcaaccctgggcagcatttctatgatagataaattgcagcaataccacttggtgcgtcgattgcatcagcaaattaaacatcgtgctgatcagacggccttccgccagtggtctcccgcagcagaaactcaacttagctggcagcaagtaggccatcaggttcaacgcatttctgctgcgctgctgtctaaaggtgtagcggtgcaggacaaagtgggtatttttgctaataacagcatggcgtggtctttagttgatttggctattttgcaaatccgtgcgatcagcgttccactttatgcgaccaatacgtcggcgcaggcggcctttgtcgtcaatgacgccgatatccgcattctgtttgtcggtgagcagtcgcagtatgatgtggcgataacgctgaaaagcctgtgtccgcagttggaaactatcgtagcgctggatccgacggttgatttacgtggctgcgagtatgctcagcaccttgcttcattcgacatcgctcccgatgaaacactgcagtttttgctgaatatgcgtatcgatagctgtgatttagacgatctgtttaccctaatttatacctcgggaaccaccggtgaacctaaaggggtgatgctggactaccgtaatatggcggcgcagctatatttgcatgatgagcgcttaacgctaactaccgatgatgtttccctgagtttcctgccgctttctcacgtttttgagcgcgcgtggagtttctacgtgatgcataccggcgcgcaaaatgtctacatcagtaatactgactgggttcgtcaggcaatgcaggccgttagcccaaccgtcatgtgtgccgttcctcgtttctatgaaaaggttttttcggcgattcatgagaaagtcgcgcaagccaaaccgcatcgccgggcgttgttccactgggcggtaagttgcggtgagaaacaattccgccgtcagcaggaagcacgcaaatcctcatggttttccgatcgtttgttcgctttggccgatcgcttagtgctgcaaaagttgcgtaatgtgctcggtggtcgcgtgcgatttttaccggcagccggtgcgcgcctagatgacaatatcattttgtttttccagtccattggaatcaatatcaaatatggctacggcatgacggaaacctgcgctacggtttcctgctgggaagaaaatgatttccgctttggttcaatcggcaagccgttgccgggtattgaagtgcgtctcggcgcggaaaatgaaattcaggttcgtgggccaatagtgatgcgtggctacctgaataagccgggagaaacggcggcgacctttactgaagacggctggttaaaaaccggcgatgcgggtgccattgatagcgcaggtaacctgtttatcaccgaacggttgaaagatttgatgaaaacatcggggggcaaatacattgctccgcagatgatcgaaggcaccttgggtcaggatcgttttatagagcaaattgccgtgatcgccgatacgcgcaaattcgtctctgcattgatcgtgccttgtttcgaatcattggaagaatatgccaaatcgatcaatttaaaatatcacgatcgtctggaactgctgcgtcatagccacattgtggaaatgtttgaacagcgtttgaaagatatgcagaaagagttgtcgaaatttgagcaggtaaagcgctttacgctgttgccaaaggctttctcaatggagtctggcgagttgacgccaacgcttaaactgcgtcgcaaaattatttctcaacgctatcagtttgagattgattctatgtatcgtgattaatatgctgacccattaatcggatgagcgatggttatctacaagccctgcgggcagcatctggaaaccaggtgtagcacgcggggcttggtgttttttgacgccagcttgctcttcccatcgttcttgtagcgcgaatcacggttttgctcaatattccggcaaaagtcattacctcatttagttctgttattgattcaccctccgacacaatcccgacaaaatgtacggtcttgctagtgttttatttttgtaaaattaatgaatacagcgtgtcacagattgaacctcctcttagcacctgatttgccgtttgcctgctagaaattctgacgttatgttaattaatcctattcgaaaaataaccagagttgggcctcgtgcctttcctacaggacgacgtagaaatgtttttctgttgtccaaaaaagtaaaactaagcccggaggcaaaaccatggagatgttgtcaggagccgagatggtggtccgatcgttaatcgatcagggcgtaaaacatgtattcggttatcccggcggggccgtacttgatatctacgatgccctgcacacggttgggggaatcgatcatattctggttcgtcatgaacaaggtgcagtacacatggccgatggctatgctcgtgccacgggcgaagtcggggttgtgctggtgacttccggccccggtgcgaccaatgccataaccgggattgctacagcctatatggattctattccaatggtggtgctgtcagggcaggtgcctagctcgctcattggctatgatgcttttcaggaatgcgacatggtcggtatttcccgtccagtggtaaaacacagttttctggttaagcgcaccgaagatattccttccgtgctgaaaaaagccttttatctggcctcaagtggacgccctggtccagtagtgattgatttgccgaaggatattgtcagcccggcgctgagactgccttatgcctatccagagcaagttagcctgcgttcatataatccaacggtacaaggccatcgcgggcagattaaacgcgcattgcaaaccattctggctgccagaaaacccattatgtacgtgggcggtggggcgataaacgccgcctgccacgaagaattgctcactctggcagagaaactgaatcttccggtgacgacgtcgttaatggggttaggtggtttcccagggacacatcgccaaagcgtaggcatgcttggaatgcacggtacttttgaagccaatatggcgatgcacaacgcggatttgatctttgccgtaggggtacgtttcgatgatcgtactacgaataatttggctaaatattgtccgaatgccactgttctgcatattgatatcgacccaacttctatttcgaaaacggtaaatgccgatattcctattgttggcgacgccaaacaggtgctgaagcaaatgctggagctggcgacacaaatcgactgtgcgcaggatttcgatgcgcttcgcgattggtggcagtctatcgaacaatggcgcgctcgtgattgcctgggttacaacaaagaaagcggcagtattaagcctcaggcggtaattgaaactctgcatcgtttgaccaaaggtgatgcttatgtgacttctgatgtcgggcagcaccagatgtttgctgcactgtactatccgtttgataaaccgcgccgttggatcaactctggcggtttgggaaccatgggctttggcctaccggcggcgctgggcgtcaagctggcgttaccggatgaaaccgtggtttgcgtaaccggtgacgggagtatccaaatgaatattcaggagttatcgacggcattgcagtataacctgccggtgttggtgctgaacctgaacaaccgttatctgggcatggtgaaacaatggcaggatatgatttactctggccgccattcgcaatcctatatggaatctctgcctgattttgtcaaactggctgaagcctacggacatatcgggatcgccattcgtaccccaggcgagctggaggcaaaactggccgaagcattaacgctgctttccgaaaccaatcgtctggtatttgtggatgtcaccgttgatgaaactgagcacgtttacccgatgcaaattcgcggtggcggtatggacgaaatgtggttaagcaaaacggagaggacctaatgatgcgccggattttatcagtattattggaaaacgaatcaggggcgttgtctcgggttgtcggcctattttcgcagcgcggatataacattgaaagcttgaccgtggcacctacagacgatccaactctgtcccgtatgaccatccaaaccgtgggtgacgaaaaagtactggagcagattgagaaacaactgcataagctggtggacgtattgagagtcagcgaactggtgcccggtgcgcacgttgagcgcgaaatcatgttggtgaaactacaggctagcggttacggacgtgaagaaatcaaacgttgcaccgagattttccgcggccagatcgttgacgttaccgcgacgctgtacaccgttcaattagcgggaaccagcgacaaactggacgcatttcttaatgcggtgcgggaagtggctgagattgttgaagttgctcgctccggcattgttggcgtttctcgcggtgaaaaaattatgcgttaagccgaaatcaggcatataaacgagataaatctgaggctctgctttgaagcagagctttttttttgcatttttaagcctgatagtgacatcctaaggtgaaagcggttgctcaatggagtgttctgcggttagatctatcatgggttatatccatagttaaattatgtatataaaacccggcagacagatctgcttttcataactttacagggtttataaggggttaacgtgaaactggatgaaatcgcgcgtctcgcgggtgtttcgcgcacaacggccagttatgtcattaatggcaaagcgaagcagtaccgggtcagcgataaaacagtagaaaaagtgatggctgtggtacgtgaacacaattatcaccctaatgccgtagcggcaggtttgcgcgcgggcagaacccgatccattggtctggtgattccggatcttgaaaataccagttatacacgtattgcgaattatcttgagcggcaggcgcgtcagcgcggctatcagctcttgatcgcctgttctgaagatcagcctgataacgagatgcgttgtattgagcatctgttacaacgtcaggttgatgcgattatcgtttcgacggcgctgccgccagaacatccgttttatcaacgctgggtagataaacccttacctatcattgcgttagatagagcgttggatcgcgagcactttattagcgttgtgggggccgatcaggacgatgccttgatgctggcgcgagagctacgcactttccctgcggaatccgttctgtatctcggtgctttaccggagctttcggtgagcttcctacgtgaacagggtttccgcgaggcctggcaggacgatccgcgtaaagtggattatctgtatgcaaatagctatgagcgggaagcttccggagtgaagtttgccgaatggctgaaaactcacccaatgccgcaggcgttgttcaccacttcctttcaattgctacaaggcgtgctggatgtcactttgcagcaaagtggccgcctgcccaccaatctggctatcgccacctttggtgataatgagctgttggattttctggaatgcccagtgttggcggtggcgcagcgtcaccgtgacgtggcggaaagagtattggaattggtgctggccagtctggatgaaccgcataaaccgaaaccgggcttgacgcgtattcgtcgtaatctgttccgtcgcggtagtttaagccgcaaataacgcgctgaatactttcgctaaaatgcaatcgggcaccttaatcggtgcccgaatcatatttgtcgctgttacttcaatgcttgtctcacacgtacccggctacgcggaacaggcggcggcaatattccagaaaatagccgtaggccacgcccataaccatagaaacgaccgcattactggctactgccgtgacgatctgctggaaatctgcaccgaccgtccacagaataatggcgtaaaccggagactgaaaactgacgtaggccagtaggtcggccagatttttcgcccaaaaatgttgtcccgcgcatcgttgagcgaaacggataaaactgtcccgatacatgccgtaaggccaagcaatcaggatgttaaccggtatggaaagcaagcgtgaagaaagcgactgctcaaaggtcatacctgaaatcagtatttcaatcgccataccggtgataaagcaatacaccacaagagcaaaggtatctgcaacggcgctacgtaagcgagaatcagtagaaaacatcgtcattacctcccagattgggggaaaatccgttaataggttaaatatgcacagctattattggtggtatgtttctattttttgttggtttatggggtattatttggtgttttgtttttactgtagtttacatgactgctttgtttaatataactagctgaaaatttctatttttaacatttgtctgatttttatacttccaactgacctgtaaagacttttttatggtgaattacgcggagggttgagtgtttattatttaaaaacaatgaattaagttcgctggtggttttaagcgtcaatggggaatttgattagcgcttaatagccatattgaaaggcgggaaaaatacattggcgctgcgctactaatttgggacttttcttaagatgcattctcttattaaaaagcggcgggtaatcagcggctaataatttatttcaaaatagattcatattcctctgagtaattgaagtaaaatgcgcccacggtgaacgcctggtaattttaatgggtattatttacgaagattatccgcaggaatgttctgcattaacattccccggcgcagccagtcactgcgggagataggcctaattcctaatattttgcattgtgcaatttttatactggaaatgagacatcccttgcagaaggaattaatgtgacaattaattgctaaattaatcgttatttaatcagtaaaatcatccggcggaaaaatagcccgtttatcatgacgttaatttccacgctacttgctgaaaacgccccttctacaagatatatctcaaaatacacccataaatattgccaaaccgcatctgctctggcttgacaaggttttcataccatccgtaaactctttaatgtggggatttgtgggataaagtggcaaataaggccatgaaggggtgactcaacgatgtttcgtggggcaacgatggttaacctcgacagcaaagggcggcttgccgtacctacccgttatcgggatttgctgaacgaggaatcgcgaggacagatggtctgcactatcgaccttcaccaaccatgcctgttgctttatcctttgcccgaatgggaaatcattgaacaaaaactttctcgtctgtcgagcatggttcctgccgagcgccgtattcagcgtttgctgttggggcatgctagcgaatgccagatggatggttccgggcgtttgttgattgcaaatacgctgcgtcaacacgccgggctgagtaaagaagtgatgctggttgggcagttcaacaagtttgaactgtgggatgaacagacctggtatcaacaagtcaaggatgacatagacgcacaacagtcgactcaggaacctttatctgagcggctacaggacttatcgctataagcatggtagataattataagcacacaagcgtgctgctggatgaggcagttaacggcctgaacattcgcagtaacggcatttatatcgacggaacttttggtcgtggtggccattcacgtctgattctgtctcaacttgggccggaagggcgtttgatagcaattgaccgcgacccgcaagctattgaagcagcgaaatccattaccgatccgcgtttctcaatcgtacacggtccgttttctgaattagcagattatgtgcgggaattggacttagtcgggaagatcgatggcgtactgttggacctgggcgtttcttcaccgcagttagacgatccagaacgcggtttttcctttatgcgtgacgggccgctggatatgcgcatggatccttcgcgtggcatttctgccgccgagtggttgatgaaagctggcgctgacgacattgcctgggtattgaaaacctttggtgaagagcgctttgccaaacgtctggctcgcgccattgttgagcgcaacctgacccagccgatgactcgcaccactgagctggctaatttgattgctaacgccagcccattccgcgaaaagcacaagcatccggccacccgcagtttccaggcgattcgcatttatatcaacagcgaactggaagaaatcgaacgagcattggaaggtgcgctggaagtattagctcccggtggtcgtctctccgtcatcagtttccattcccttgaagatcgtattgttaaaaactttatccgtaaccaaagccgtgggccgaaagtgcctgccggtctgccgttaacggaggagcagttacagagtctgggcggacgtaatttgaaatccgtagggaaaatgatgccttccgacgcggaagttgcggaaaacccacgggcgcgtagctccgtactgcgttttgcagagaggattaacgcgtgataggcaacgaacgccacggcttggtaggggtcattggcggagatttactccgtaatgccaagattccattgattctgctggttgcggtgttgatctctgcggtgttagtggtgacaaccgctcaccgcacccggttgctgaccgccgaacgtgagcagctggtgctggagcgtgatgctctggacatcgagtggcgtaacctgattctggaagagaacgccttgggcgatcacagccgggtcgagagtatcgctactgataagttaaaaatgcagcacgttgatccagcacaagaaaacattgtggttaaacaatgattaaatttgcactcaccatgactcggagtagccaaggtaacgcatgaaagcagcgcgccccggtaagttgaaacggcaggaagaacaagccagctttataagctggcgttttgcattgctgtgcggctgtattttactggctttggttgggctgatgctacgcactgcctacctgcaagtgatcaatccagacaaattggtacgggaaggcgacatgcgttcgctgcgggttcaatccgtacctaccgctcgcggcatgataagcgatcgagccgggcgacctctggcggtgagtgttccggtgaatgccatttgggccgatccgaaagaactgcaggaacgtggcggaattacgctggatacgcgctggaaagccctgtccgacgcgctggaaatccctctcgatcagttggcttcccgcattaacgcgaatccgaaaggtcgctttgtttatctggcgcgtcaggtcaatccggctattggtgactatatccataagttgaaattgccgggtatctatctgcgtcaggaatcccgccgctactaccctgcggggcaggttatggcgcatatcatcggcgtgaccaatatcgatggtcagggaattgaaggggttgagaaaagcttcgatcgctggctaaccggtcaaccgggcgaacgtacggtgcgtaaagaccgctatggtcgggtgatcgaagatatctcctctgtggatagtcaggcggcacataatctggcgctgagcgtcgatgaacgcctacaagcgctggtttatcgcgaattgaacaatgcggtggcgttcaacaaagctgaatcaggaaccgcagtgctggtggatgtgaacaccggcgaagtgctggcaatggccaacagcccttcttacaacccgaacaacctaaccggtacgccgaaagaagccatgcgtaaccgggcaattaccgatattttcgagccgggctctacggttaagcctatggtggtgatgaccgcattgcagcacggcgttatcaaagaaaacagcgtattgaatactctgccgtactttgttaacggccatcagatcaaagacgtggcgcgttatgcagagctgtcggtgacagggattctacagaagtcgagtaacgtcggtgtttctaagctggcgttagcgatgccatcctcagcgttagtagatacttactcacgttttgggtttgggaaagcgaccaatttggggttggtcggagaaagcagtggcttatatcctaaaaaacaacggtggtctgacatagagagggccaccttctcttacggctacgggctaatggtaacgccgttacagttagcgcgagtctatgcaacgatcggcagtatgggtatttatcgcccgttgtcgattaccaaagttgacccaccggttgccggtgagcgcgtcttccctgagcccattgttcgcaccgtggttcatatgatggaaagcgtagcgttaccgggcggcgggggcaccaaagctgcgattaaaggctatcgtattgcgattaaaaccggtactgcgaagaaagtcggaccggacggcaaatacgtgaaccgatatcttgcgtataccgccggcgtcgcgccggcaagcaaccctcgatttgctctggttgtggtcattgatgacccgcagggcgggaaatattacggcggtgcggtttctgctccggtatttggcgcaattatgggcggcgttttgcgtaccatgaacgttgaaccggacgcgttaccgaccagtgataaaagcgaattagtaattaataaaaaagagggttcaggtggcagatcgtaatttgcgcgacttactcgctccttgggggcttgacgtcccggggcgtgcgctacgggaaatgacattagacagccgcgtggcggctgccggggatctgtttgtcgccgttgtcggctaccagacggacgggcggcgctatattccgcaggctattgctcagggcgttgccgccgtgattgctgaagccgaaggcgtagcaccagatgccagcattacggaaatgcacggcgttcccgtgatttatctgagcaatctgaatcaacatttatccaaactggcaggccagttttaccaacagccgggcgcggcgttgcgcttaattggcgtcactggcaccaacggtaaaaccaccactacgcagctgttggcgcaatggactcaggcgttgggggagagcagtgcagtgatgggtaccgtgggtaacgggctgctgggacaggttgtgccgacagaaaataccaccggctcagcggttgatgtgcaacagattttgcattctctggttgaacagggcgctaaagtggccgcgatggaggtttcttctcacggactggtgcaaaaccgcgtggcagcgctgccgtttgccgccgccgtgtttaccaacctgagccgcgaccatctggattaccacggcgacatggcgagctatgaagcggctaaatggctgctgttctccactcatcaggccgaacacaaaattatcaatgctgacgatgacgtcgggcaacgctggctgagccagttgcctcaggcggttgccgtcagcatggaagataaagtgccgcagggctggaacggtccttggctgtctgccactcacgtggattatcacgataacggcgctacgatttcttttgactccagttggggtaaaggtcagttggaaagccgcctaatgggcgcatttaacgtcagtaacctgctggtggcgctgtcgaccttgttagcgctgggttatccattggcggagttgttaactgctgcacctaggctccagccggtttgtggtcgtatggaagtgtttaacgctccaggtaaacctacggtagtcgttgattacgctcatacaccggatgcgttggaaaaagctttggcggcggcccgcctgcactgcaaaggtcaactgtggtgcgtattcggctgcggcggcgatcgtgacaaaggtaagcgcccacttatgggagccattgcagaacagctggccgatcgcgttgtcgtgaccgacgataacccgcgtagcgaggagccgcaggctatcgtggctgatattcttcgcggtttgatggatgcgggccgtgcgctggcaattcatggccgcgccgaagcggtaaccagcgcgattatgcaggccaaagaagaagatgtggttttggtggccggtaaaggtcacgaagattaccaactggtaggcaaccgtcgtctggattattccgaccgtattaccgttgcccgtttgctggggggggtcgcatgattcccgtttccctgcaatacctcgcggagcagcttaatgctgagctggtcggtaacgacgatatgattaccgaagtgaccaccgatacgcgtcaggtgacggcaggttgcctgtttgtggcactgaaaggcgagcgttttgacgctcatgattttgctgaagcagccgttgccgcaggtgctggggcgttgttggtaagtcagcgcttattggtggatgttccgcagatcgtggtgaaagacacccgtctggctctggggcagtttgccgcttgggttcgtcagcaagtgcctgccagagtcgtcgcgttgaccggttcttccggtaaaacctcggttaaagagatgaccgcagcgattctgcgtcagtgtggcaacgtgttgtatacctccggtaactttaacaacgatatcggtgtgccgctgacattactgcgtttaacaccagaacatgattttgcggtgattgaactgggtgcgaaccatattggcgaaatcgcctacaccacggatttaagccgcccggaagccgcattggtgaacaatctggctgccgctcatctggaaggctttggttcactggcgggcgttgcgcaggcgaaaggtgaaatctttgccggtttgccagccaaaggtattgccattcttaacgctgacagtcatgactggccgcattggcagtccacgctggctcacaagcaggtttggcgtttttcaccgcaggccggtgaagacactgatttttatgccagcgatgtgcgcattcatcagcaaggtatggatttcactctgcattcgcctttcggcaatgtagccgtgtcgttgccgttaccgggtcgccataacatcgccaatgctttggctgccgcggccctcgcgatgtcggtcggtgcagatgtcgatgcggtgcgtcagggtttatctcagttgcaagcggtaaaagggcgtttattcccgatttcgctggccgaaggaaagctgctgctagatgacacttataacgccaacgtgggttccatgatcgccgcggcgcaggttctggccgatatgcccggttactgcgtaatggtggtgggtgatatggccgaattgggtgaaaccgcagaagattgtcaccgtcaggtgggtgaagctgcccgtctggctggagtggataaagtgttgagcgtggggaaattaagtcagctcatcagtcacgccagcggtaacggcgagcattttcaagataagagcgcgttgacggctcgtttggcggccctgttgtccgaacatcaagttatcaccgtattaattaaaggttcacgtagtgctgccatggaaagtgttgtgcaggcgttacaggagaaagcatcatgttagtgtggctggctgaatatctggtcaaattctattccggttttaacgttttttcctatttgacgtttcgcgccatcgtcagtctgttgaccgctctgtttatctccttgtggatggggccacgcctgattgcttatttgcagaagctgcaaatcggtcaggttgtacgtaacgatggcccggagtcacatttcagcaaacgcggcacgccaaccatgggcgggctgatgattctgttctccattaccatttcggtattaatgtgggcttatccgtctaacccttacgtctggtgcgtactgtttattctggtgggctacggaatcgtcggttttgtcgatgattaccgcaaagtggttcgcaaggataccaagggactgatcgcccgctggaagtacttctggcagtcggtgatcgcgctggccgccgcctttaccatgtacaccatcggtaaagacaccccggcaacgctcttggtggtgccgttctttaaagatgtgatgccccagttggggctgatgtacgttctactggcgtacttcgtgatcgtcgggaccagtaacgccgttaacctgaccgacggtttggacggtttggccattatgccaacggtatttgttgctgcgggcttcgcgttggtggcctgggcgacgggtaacgtcaactttgccaactatttgcacattccttatctgcgtcattccggtgaattggtgatcgtctgtaccgccatcgtcggcgccggattaggtttcttatggttcaacacctatccggcacaggtctttatgggcgatgtcggctcactggcgctgggcggcgcattaggcaccatcgccgtattgctgcgtcaggaattcttgttgctgattatgggcggggtattcgtggtggaaaccctgtcagtgattctacaggttggctcctttaagcttcgtggtcagcggattttccgtatggcaccgattcatcatcattatgagctgaagggttggcctgagccgcgcgtgattgtgcgcttctggattatttcgctgatgctggtcctgattggcctagcgacgctgaaggtgcggtaattatggtggattatcagggtaaaaaagttgtcattattgggctggggctaaccggcctctcctgcgttgatttctttatgacgcggggcgtttcgccgcgcgttatggatacccgcatcaatccaccgggtctggataagcttcctgccggtttggagcgacatttgggcgatctgaatcagcaatggctgttagacgccgatttaatcgttgccagcccaggtatggcgctggctaatccggcgttgagtgaggcggcggaagctggcgttgaaatcgtcggtgatattgaactgttttgccgtgaaaatcaggcgcagatcgttgcgattaccggctctaacggtaaaagcacggtcactacgctggtgggtgagatggcgaaagccgcaggctggcaggttggcgtcggtggcaatatcggcgttccggctctgaccttgctgaagcaggaaaatcagttggtggtgctggaattatccagcttccaactggaaaccacctcaagtctgcacgccaccgccgcgaccgtcttgaacgtgacggaagatcataccgatcgctatccgtttggtttgcaacaatatcgcgccgccaaactgcgtatttatgaaaatgccaaaacctgtgtggtaaacgccgatgatgcgctaaccatgccggtacgcggagccgatagccgctgcattagctttggcgttgatgtgggcgattaccatctgaataaacagcagggcgaagtctggctgcgggttcgcggcgagaaagtgctgaacacccgcgaaatgaagctgacaggccgacataactataccaatgcgttggcggcgctggctttggctgatgtggcggggatccctcgttcatcgagcttaaaagcactgaccacctacgcagggctggcacatcgcttccaattggtgtttgaaaacaacggggtgcgttggattaacgattccaaagccaccaacgttggcagcaccgaagcggcgctggacgggctatacgtcgatggcactctgcatttactgctgggtggcgacggtaaatccgctgatttttccggtctgacccgttttctacagggtgacaaagtccgagtctattgtttcggccgtgacggcgagcagttagcgcagttgagaccggaagtctctcagttgactgaaaccatggaacaggcaatgaaattgctggcacagacgctaaaaagcggcgatatggtgctgttatcacctgcctgcgccagtctggatcagttccgcagttttgaacaacggggcaccgaatttgcccgtctggcggaggaactgggctgatgcgtatgctggggctagggctgtttaataagttaaagcactgggtcatgggatcgcgggagagcgacgccaccagtatggtgctttatgacagaaccttgctgtggctgacctttggtttagccatcatcggttttgtgatggtgacttcggcatcaatgcctatcggtcagcgtttggcgggcgatcctttcctgttcgccaagcgtgacgcgctctacctcggtttggcctttggtttgtcgctggtcacgctacgtattccgatggaaatctggcagcgctacagcaacattatgctgctgctgtccatcgtgatgctgctaattgtattggtagtcggtagctcggttaacggtgcatcccgctggatttccatcggcccgttgcgtattcagccggcggaattatctaaactctcgctgttttgctatctggccagttatctggtgcgcaaggttgaagaagtacggagtaacttctggggcttctgcaaaccgatgggcgtgatggtaatactggcagtgctactgctggctcagccggatttgggcaccgtggtggtactgtttattactacgctggcgatgctgtttttagccggagccaaaatgtggcagttcctggcgattatcggctccgggatttttgcagtttgtctgctaatcattgccgagccttaccgtatgcgccgggttacttcgttttggaacccgtgggaagatccttttggcagcggttatcagctcactcagtctctgatggcgtttggccgcggggagttctgggggcaaggtttaggtaactcggtgcaaaaactcgagtatttgccggaagcacataccgactttattttcgcgattttaggggaggaactcggctatttcggtgtggttttagccctgttaatggtattcttcgtcgcttttcgcgcgatgtccattgggcgtcgtgcgttagagattaatcagcggttttccggctttttggcctgttcaatcggcgtttggtttagtttccaggcgttggttaacgttggggctgcggctgggatgttaccgaccaaaggtctgacactccccctgataagttacggtggttccagtctgttgattatgtcaacagccatagttttactgctgcgtattgattttgaaacgcgtttggcgaaagcccaggcgttcgtaaggagtgcccgatgagtgggaaaaccaagcgtttaatggtgatggcaggcggaaccggtggacatgtgttccccggtttggccgttgcgcatcatctgatggcgcagggctggcaggtgcgttggttaggcaccgccgatcgcatggaagccgatttggtccccaaacacggcattgagatcgattttattcagatttccggtttgcgtggcaaagggctgaaagctcaactgactgctccgttgcgcatctatcgtgccattcgtcaggcgcggaaaatcatgcgtgattaccagccagatgtggtgctgggaatgggcggctatgtttctggccccggcggtctggcggcgtggatgaacggtgttccggtagttttgcatgagcaaaatggtatcgcaggtttaaccaaccgttggctgtcgcgtattgccaaaacagtattgcaggctttccctggcgcatttcctcacgcagcagtggttggcaatccggttcgtacagacgtattggcattgccgctgccggctgaacgtttagccggtcgtgaaggggcgacgcgtgtgctggtgatcggggggagtcagggtgcgcgcgtgctgaatcaaaccatgccgcaggtggcggcggatctgggcgataaaatcaccttatggcatcaggtgggtaaaggtgcgttggctgaagtcgagcaggcttaccaacaggccggacagacgcagcacaaaatcgtcgagtttatcgatgatatggctgcggcctatagctgggctgacgtggtggtgtgccgttcaggcgcgttgacggtcagcgaagtggctgccgccggtttacccgcgatttttgtgcctttccaacataaagatcgtcagcagtactggaatgcgttgccgctggaaaaagccggtgccgccaaaattatcgagcagccgcagtttactgcttccgcggtgagcagcctgctacagcagtgggatcgaccgacgctgttagcaatggcggaacaggcacgagccgttgccattccggatgcgaccgagcgcgtggccgcggaagtgatcgctgctgcgaagccttgattcaaggcggaaataatgaacagttggcgtttaacgcgggctgtagagatgtaacaaactacatagtgaagaaaaacgtgaatacacaacaactggcgaaactacgtactatcgtgcccgagatgcgacgcgtccggcacattcactttgtcggcatcggtggtgctggcatgggtggtatcgctgaagtgttggcaaacgaaggctatcagattagcggttctgacctggcgccaaacccggtcactcagcagttaagcgcattgggcgcgcagatttatttccatcaccgtccggaaaatgtccgtgatgcgagcgtggtggtggtttcaacggcgatttctgcggataacccagaaatcgtggccgcgcgggaagcgcgtattccagtcattcgtcgcgctgaaatgctggcggaactgatgcgttatcgccacggcattgcggtagccggtactcacggtaaaaccaccacgacggcgatggtttccagcatttacgctgaggcggggttggatccaaccttcgtcaacggcggtttggtaaaagcggcaggcgttcacgcgcgtttgggctccagccgttacctgattgcagaagcggatgaaagcgatgcttccttcctgcatttgcagccgatggtggcgattgtgaccaatatcgaagccgaccatatggatacctatcagggtgactttgagaatttaaaacagacatttattaacttcctgcacaacctgccgttctatggtcgcgcagtgatgtgtgtggacgatcctgtggtgcgtgagttgctgccgcgcgttggtcgtcacattaccacttacggtttcagcgatgatgctgacgtacagattgccagctatcagcaaattggcccgcagggtcactttaccctgcgtcgtcaggataaacctttgctgacggtgaccctgaatgcgccgggtcgtcataacgcactgaacgccgccgccgcggttgcggtagcaacggaagaaggcattgacgacgaagcaattttacgtgcgctgagcggtttccagggcaccgggcgtcgtttcgatttcctcggtcatttcccgctggaaaatgtgaacggtaaaagcggtagcgtgatgctggtggacgattacggccatcacccaacggaagtggatgccactattaaagcggctcgtgcgggttggccggacaaacgtatcgtgatggttttccagccgcatcgttatacccgtactcgtgatttgtacgacgactttgccaacgtgttggaaggtgtggacgtgttgctgatgctggatgtgtattccgctggcgaaacgccaattcctggtgccgacagccgttctctgtgccgcaccattcgtaatcgcggccagttggatccaattttagtaacggatagcgacgcagttccgtcagtattagctaaagtattgaatgacaacgatctgatcctggttcaaggagcaggcaatatcggtaaaatcgcgcgcaatctggcagagaccaaattgcagcctcaggtgaaagaggaggaacatcatggttgataaagtcgccgtactgctgggtggaacctccgctgaacgcgaagtgtcattgatgtccggcgcggcggtattagccggtctgctggaaggcggtgttgatgcccatcccattgatactattgattttcctgtggctcagctcaaagagcatggcttcgataaagtctttatcgctctgcatggccgcggcggtgaagacggtacgctgcaagggctattggagtttctgcaactgccttataccggcagcggcgtcatggcctctgcgctgacgatggacaaattacgcagcaaattagtgtggcaggctttgggtttacgggtttcaccttttgtggcgctctctcgtcaacaatttgaaacactttcatctgatgacttcgctgagcggatcgctaagcttggcctgcctttaatcgtcaagccaagccgcgaaggctctagcgttggcatgagtaaggtggatcgcattgagaatctgccggtagcgttggaagaagcgttccgtcacgacaatgatgtactgattgaaaaatggctcagtggcccggaattcaccgtggcaatgttgggtgacgaagtgttgccttcgatccgcatccagcccgccggtgtgttttatgactatgaagccaagtatttatccgatgatacagaatacttttgcccaagcggtttaaacgcggaacaagagcaacagctggccgaactggctcgtcaggcctatcaggctctgggttgcagcggctggggtcgggtggatgttatgcaggatggcgatggcaaattctatctgttagaggtgaatacctctccgggtatgaccagccatagcctggtaccgatggccgcacgtcaggccgggatgagtttctcccagctggttacgcgcattctggcgctggctgactgatatgtcgcaagctgctctgaatgcacgggaacgtgccgccgaaacccgcgctgctcgccggagcaacggaggccagttagcggggttggttttcctgctgatggtgctgggaaccgtgctatggagcggctgggccgttgtaggttggatgaaggatgccagccgtttgccactgtcaaaactggtggtgaccggcgaacgccattacaccaccaatgacgatattcgccaggcgattctggctttgggcgcaccgggaacctttatgacgcaggatgttaacatcatccagcagcagattgaacggttaccctggattcagcaggctagcgtgcgtaagcagtggccggatgagctgaaaatccatttggtggagtatgtgccggttgcccgctggaacgatttacacatgattgatgccgcgggtaagtcgtttagcgtgccttcggaacgcatcggcggccagaaattgccgctgctgtatgggcctgaaggcagtgaacaggatgttctggagggctaccgggcgatgagtaaggtgttagcggccaataaatacacgctaaaaatggcggcaatgagtgctcgtcattcttggcaactggccttagataacgatgttcggctggagctggggcgggatgatcgcatgggacgtttgcagcgctttatggagctgtaccccatgctagagcagcagccagataaacgggttagctatatcgacctccgttatgacaccggcgctgcggtgggttggtccccggtatttatcgaccagcaggctagcagccagcagaacagtaatccgcaacagaatcaggcacaggcaaaacaacaatgatcaagtcgacggacagaaaactggtagtgggtctcgagatcggtacggcaaaggtctccgcattggtaggggaagttctgcccgatggcatggtcaacattattggggttggcagttgcccatcccgtggtatggataagggtggcgttaacgatcttgaatcggtagtgaaatgcgtccaacgtgcgatcgatcaagcagagttaatggcagattgccagatttcctccgtttatctggcattatcgggtaaacatataagctgtcagaatgaaatcgggatggttcctatttcagaagaggaagtaactcaggaagatgtagagaacgtagtgcataccgcgaagtcggtacgtgtgcgtgatgaacatcgaatcctgcacgttatccctcaggaatatgccattgattatcaggaaggtattaaaaatccggttggcctttccggtgtgcggatgcaggccaaagtacacctgattacctgccataacgatatggcgaagaatattgtcaaagcggttgaacgctgcggtctaaaagttgaccagcttatttttgccggtctggccgccagttatgcggtattgaccgaagacgaacgcgaactgggcgtttgtgtggtagatatcggcggcggtaccatggatatggcggtgtacaccggtggtgcactgcgtcacaccaaggtgattccttacgctggtaacgtagtcactagcgatattgcctacgcctttggcactccgccgaccgatgcggaagcgattaaagttcgacacggctgtgcgctcgggtcgattgtcagcaaggacgaaagtgtagaagtgccaagtgttggcggacgtcctccccgtagtctgcaaagacagacactggccgaggtcattgaaccacgctatacggaattgctgaacctggttaatgacgagattttacagttgcaggaacaattacgtcagcaaggcgtaaaacaccacttggcagcaggtattgtgcttacaggtggtgcggcacaaattgatggcctggccgcatgtgcgcaacgggtgtttcatgcccaggtacgtattggccaaccgctcaatattaccgggctgacggattatgcgcaggaaccttactactccactgctgttgggttattgcactacggtaaagaatctcatctcagtggtgagtcagaagtagaaaaacgtgcctcggtgggcaattggttcaaacgtatcaatagctggctgagaaaagagttttaatgtttcaacaaagagatcatgctgaacatattttttgatctcgaagcgacaggcacaaaacggagagaaactatgtttgaacctatggaactgaccaatgacgcggtgattaaagtcatcggcgtcggcggtggcggtggcaacgccgttgaacacatggtgcgtgagcgcatcgaaggtgttgaattcttcgccgttaatacagacgctcaggcgctacgtaaaacggcagttggccagactatccagatcggtagcggtattaccaaaggtctgggtgctggtgcgaacccggaagtgggtcgtaattctgcggaagaagatcgcgaagcgctgcgtgcagcactggatggcgcggatatggtcttcatcgcggcaggtatgggtggcggtaccggtactggtgctgcgcctgtagttgcggaagtagcaaaagaactgggtattctgacagtggccgtggttaccaagcctttcaactttgaaggcaagaaacgcatggcgttcgctgagcagggtatcgctgagttgtctaaacacgttgattcattgatcactattccgaacgacaagttgttaaaagttctgggtcgcggcatctctttactggatgcattcggcgcagctaacgacgtgttgaaaggtgccgttcagggtatcgccgaactgatcacccgtcctggcctgatgaacgtcgactttgctgacgtgcgcaccgtgatgtccgaaatgggttatgccatgatgggttccggcgtcgcttgtggtgaagatcgtgcggaggaagcggcagaaatggcgatttccagcccgttgctggaagatatcgacttatctggtgcccgtggcgttctggtcaacatcaccgctggtttcgacctgcgtttggatgagtttgaaaccgtaggtaacaccattcgtgccttcgcgtctgataatgctaccgtggttatcggtacctcattagacccggaaatgaacgacgagctgcgtgttactgtggttgcgactggtatcggcatggacaaacgtccggaaatcacgctggttaccaacaagcaaactcagccagtgatggatcaccgttatcagcagcacggtatgtcaccgttaccgcaggaagtgaagcctgcggcgaaagtggtgaacgaccaaactgctcaaacgaacaaagagccggattatttggatattccagcgttcttgcgcaagcaagctgattaatttccaaaaatttggtatctccgctctttgtgctaaactgtcccaccgatcttcctatatgctagatcggtaggatggataacattgcgagataaaacgatgatcaaacaaaggacattaaaacgtattgttcaagcgactggtgttggtttacataccggcaagaaagtcacgttgacaatgcgccccgcgccggccaataccggggtcatctatcgtcgcactgacttgaatccaccggttgatttcccggcagatgcaaaatccgtgcgtgataccatgctctgtacttgtctggtcaacgagcatgacgtgcgtatttctaccgttgaacatctcaacgctgctttggcggggttagggattgataacattattatagaagtaaatgcacctgaagtgccgatcatggacggcagtgccagtccattcgtgtacctgctgctggacgccggaattgaagagctgaattcagcgaagaaattcctgcgcctgaaagataccgttcgggttgaagacggtgataaatgggctgaactgtctccattcaatggattccgtttagatttcaccattgatttcaatcacccggcgatagataccagtacgcagcgttaccgcctggatttctctgctgattcatttgtgcagcaaatcagtcgtgcgcgtacttttggctttatgcgtgatatcgaatatctgcagtcccgcggtttgtgcctgggcggtagtttcgattgtgccatcgtggtagatgattaccgcgttctgaatgaagatggcctgcgcttcgaagatgagtttgttcgtcacaaaatgctggacgctatcggcgacctgttcatgtgcggccacaatattattggcgcgttcaccgcgtataaatctggtcacgcactgaataacaagttactgcaagccgtattggcaaaacaggaagcttgggaatatgtgacgttccaggacgaagccgaaatgccattggcattcaaagctccgtctacggtattggcttactaaagctacttatcacgtttggttgcgttggcactctctccggccaacgcagccagtcgttccaaaatagtcctcaatttctctgggctacggctcgccaatcctcgtaattcctttgcactttccaaactcaagtgacgtaatggcgctgactcttcgcttttttgcgcggcctgagcggtttcttgtattttgttctgccctttcgccattaacgcaggattaatcctgatgtcgattgaagacaatgatggtagaatttgcgctcgtagtgcagaaagcaggttagattgttcgtaacgtaaccgcattagccaactggcgttggcggtttctagcaccaaaatactctgtcgataattggccacacggcaccaaggctgcaactgtgacggaagcaatgcttttaccgcacgattgagctttaacagtgcgactgcgcgctgctgtacattgtgcagtgggcctttctccgttgcggtcgcatcgtcgaacagaacatctaataattgtgggcggctttcacgcattgacagggctccggcggattttaaacttgtgatcggtattctaaatcgttggcgacaatttggcagacgttatttctggccgcatctcctattggggatggtcgcggcgagtcttggcgtgccgtcaaacttgtccagcgggccagatcaaaccgcactgccgagtacatcttccagccaaagccgccaaaatcacggtgcgaccaactttaatagtctagctctgctgcaagagacgcatcgccgtccttccttcagcgtagactattggcagcagcatgcgcttcgcaccgtcattcgtcacctttcttttgctcttgcaccgcaggtcgcctatagccgcgtgcaggaagccgagacgctagaacaggtagagccgacgcaaattcaacagcttgcgctactggatacgcttaatgcgttgctaacccacgagtcgcggcctccgaccatcattcgctataccaaacgagcgcctcagcccgttttatcccttcatcaacccggcttatggcttgcgcaggtacaaggcattcgtgccggaccggttcgttacagctagttattcctctgaagtcttttaacttaatgtaacctttgaccgccggtttggtggtcttgtaagagatataaagaattatgctaatcaaattactcactaaagtttttggcagccgtaacgatcgaaccctgcgtcgtatgcgcaaagtggttgatgtgatcaaccgtatggaaccggacatggaaaaactgtccgatgaagaattaagagccaaaacggatgagttccgcgcacgattggcgaaaggcgaagtgttggaaaacctgattccagaagcttttgctgtggttcgcgaagccagtaaacgcgtattcggcatgcgtcacttcgatgtgcagctgttgggcggtatggttctgaacgagcgttgtattgcagaaatgcgtaccggcgaaggtaaaactttaaccgcaacgctgccagcttacctgaatgctctgactggccgcggcgtacacgtggttaccgtcaacgattatctggctcagcgcgatgcggaaaataaccgtccactgttcgaattcctcggcttaactatcggtattaacctgccgggtatgacagctccagcgaagcgtgaagcctatgccgctgatattacttacggtactaacaacgaatacggttttgactacctgcgcgacaacatggcgttcagcccggaagagcgtgtgcagcgcaaactgcactatgcgttggtggatgaggttgactccatcctgatcgatgaagcgcgtactccgttgattatttctggccctgcggaagacagttccgaaatgtatattcgggttaacaaactgattcctaaactgatccgtcaggaaaaagaagattccgataccttccagggtgaaggccacttctcggtagatgaaaagtcccgtcaggtgcatttaactgaacgtggcttgatcatgatcgagcagatgttagtggaagccggcattatggacgaaggtgaatctctgtactcaccggccaatattatgctgatgcaccacgtaaccgccgcgctgcgtgcccacgtactctttacccgcgacgttgactacatcgttaaagatggcgaagtcatcatcgttgatgaacacactggtcgaaccatgcaaggccgccgctggtctgacggcctgcatcaggccgttgaagccaaagaaggggtggaaatccagaacgaaaaccaaacgctggcttccattactttccagaactatttccgtatctacgaaaaactggccggtatgaccggtactgcggataccgaagcctttgaattcagctctatctataagctggataccattgtggttccaaccaaccgcccaatgatacgtaaagatctgccggatctggtctatatgactgaaatggaaaagattggcgccatcattgaggatatccgcgagcgtactgctaacggccagccagtgctggttggtacgatttccatcgagaaatccgaagtggtctctgctgaactgaccaaagccggcatcgaacataaagttctgaacgctaaattccacgccatggaagccgaaattgtgtctcaggcgggtcagccgggtgcggttaccatcgcgaccaacatggccggccgtggtaccgatattgtgttaggcggaagctggcagagtgaaatcgcacagttggaaaatccgactgaggagcaaattgccgaaattaaagccgcatggaaaattcgtcacgatgcggttctggcatccggcggtttacacatcatcggtactgaacgtcacgaatcccgtcgtattgataaccagctgcgcggtcgtgcgggtcgtcagggtgatgccggttcttcacgcttctacctgtcaatggaagatgcgttgatgcgtatttttgcctctgaccgtgtgtcaggcatgatgcgtaaactgggtatgaaaccgggcgaagccattgagcatccttgggtaaccaaagcgattgctaacgcacagcgtaaagtcgaaagtcgtaacttcgatattcgtaaacagctgctggaatacgatgatgtagccaacgatcagcgccgtgcaatctacagccagcgtaacgagttgctggacgtgtctgacgttagcgaaactatcaacagtattcgtgaagatgtgttcaaagttacgctggatagctacattccgccgcaatctttggaagaaatgtgggatgttgaggggctggaacagcgtctgaaaaacgacttcgatctggatatgccgattgcgcaatggctggaagatgaaccacagctgcatgaagaaaccctacgtgagcgtattcttcagcaggcaattgacgtttacaaacgcaaagaggaagttgtcggcgttgaaatgatgcgcagcttcgaaaaaggcgtgatgctgcaaacgctggattccctgtggaaagagcatctggcagcgatggattatctgcgtcagggtatccatttacgtggctatgcgcagaaagatcctaagcaggaatataagcgcgaatctttcgctatgtttgctgcgatgctggaatctctgaaatatgaagtgatcagcgtgctgagtaaagttcaggtacgtatgccggaagaggtcgaagcgctggaagttcaacgccgtgaagaagctgagcgtttggccagacagcaacagctgagccatgaaaatgacaatagcgccctgatgtctgaggaagaggtgaaagttgcagccagccttgaacgtaaagtgggccgtaacgatccttgcccttgtggttcaggtaagaaatataagcaatgtcatggccgtttgcagaaataaagctgcgattagccagcaatagttaaaacagtaaatagcggggcggccaaatagaccgcccttctttttgcttaatatcgcggaatcaggatgtgaacgtgagataaacgaggaatatcagaatgaaacatttgcagatcgccgtgggtatcatccgtaatgcgcaacgcgagatttttattacccagcgcgcggcagattcccatatggcgggtttctgggagtttcccggagggaaaatagaacagggtgaaacctcggaaatagctttgtatcgtgagctattggaagaggtcggtattgttgcgcaaaatgcggtgcagataaccactctggaacatcgttttcctgaccgaattgtcactctcagtttctatctggtagaacaatggcagggcgaaccttttggtcgggagggccagccggtgcgctgggttaagcaagaggagttacgggctgaggaattcccaaaggctaatctatcgatagttgagttactggtttctcaggcataatcacactcagattggagcacacaatgcgtggctccaatctgtgagcgcattagcgcggatcttcctcactccattcatcgctatctgagagttctccctgacttggaatacgcttctcttcatcggcccactcgccaaggtcgatcaactgacagcgtttgcagcaaaaaggacgatacgggctttgctcgccccaaataacgattttcccgcaggttgggcaattaacctgtatttcagttgaatccatattctctcctaaaacttgcttactgtatgacaacacagccataagcatcaataagtgcaaaagttaacaacaggccaactcaaagtttaagcgtgcgggtacagtgccattctcgctatccagcggtaggaaacgtatcgcgtagcgggttttgtggccggaaacctgcggataaagctgatgttccatggaaattcgcagtcgcaataaatcagcgccgtcggcattatcctggaagaatccatttaggctgatttggttgcgcaacgggccagactggcgaattaaatccagaatcatggttaatgattgattcagcggaattaacgtaccaagtaattcattggtatgctgattgcgttgttcctgcggcagatgcagccaaatatgtagcgtaggcagatcgaaactacaacaaccgcctggaatactgagccgttggcgaaccagactaatcatgcgatcttctttcagcgactgtccgatacgcggtgcggacatcagcactgatgcccggcttttcagctgagcgcgtaattcatcaatcaacgccatatcgacaccgggaacatcagcccaggcctgaagtttttgctgctgacgctcaagttctttgagtaaatcagtgcgaacttcccccctttcaagcacatcgatcagatcggatgcggtgcgaaaaaacgttaaggcgctggcgatattatccagatttcgctgactttctaactgttgcagcaaaaactcaatacgaagccaggtgcgcattttttcattcagcgggtgttcaaaaagtacagttgaggtgagatcactcatcggtgtaaatcctgttgggtcaccgtcgccaaccttaaataccggtgatgaagcgaggcaacgagcggtgggatcgtggaaggatcgccgctattgtcgataatgtcatccgcacaggccagacgctgttgccgcgtggcctgcgaagctaaaatatgttctgcctgctgacggctgataccgtctcttgccatggtgcgtctaagctgaatctcaggggtgacatccacgaccaatactcggttagctctatggctcaggttattctcaaccagtaaggggacaacccaaagtacataagccgcttttgcagctgcgagctgacgctgagtttcttgctgaatcagtggatgcaacagcgcattgagccagtttttttccatcgggtcgctaaaaatcttttcccgcagcttggctctattcaggctgccgtctgccagcaggatagaatatccataacgggctttaatctcatttaacgccggcattccaggctcaacaatctgtcgggcaatgatatccgcatcaaccagcggtacgccgagatcggcaaaagcattagcaacggtacttttcccactaccaattccgcctgtaagagcaacaatataggtcattacattgccttgcatactgccgttgaatacccgaattgtaactgaaagctgtgtgtaagacatagcgcggatgcattcggattttgaatctgtctttaatgcctattctctggccgagggagtattttttatatcaatattgctgatagttacgctgctcggaatagtgtaaccagacgaaccagtcaggaagggaaaatgcatggttttcaggtaatttgtgggagtgtagcctaaataaagttaaattcgcagtcttgccgaagaattattcctgcgtatgatagcttcactggaaatggcgtctattacgcccgatctcatcatgcgatccatcgccaataaccaggaaaccaaagccatgcgtattgaagaaggtttgaaattaggttttaaagatgtcttgattcgacctaaacgctccacgctgaaaagtcgctccgcagttgagttagagcgtcagtttaccttcaaacattcaggctataagtgggctggtgtacccattattgcagcgaatatggataccgtcggcaccttccgcatggctgaggttctctcctcatttgatgttcttaccgcagtacataaacactattccgttgaacaatgggccgattttgttcgacgtgtgcctgaatcggtactgcgccacgtcatggtttctaccggtacatctcaggcagattttgccaaaatgaagcaaattctggcgctttctcctgcgctgaaatttatctgtattgatgtagccaatggttactctgagcactttgttgctttcctgcaacaggctcgcgaagcttgccctgacaaagtgatttgcgcaggtaatgtagtcacaggcgaaatggttgaagaactgattctgtctggcgccgatattgtaaaagtagggattggcccaggttcggtttgtacaacccgagtgaaaactggcgtgggttatccgcagctttctgccgtgatcgaatgtgctgatgctgctcacggtttaggtgggcaaatcgtgagtgacggtggttgttccgttcctggcgacgttgccaaagcgttcggtggcggcgcagactttgttatgttgggcggtatgttagccggtcacgacgaatgcgaaggtaaagtggttgaagaaaacggtgagaaattcatgctgttctacggtatgagctctgagtcagcgatgaaacgtcacgttggcggcgtagcagaatatcgtgccgccgaaggtaaaaccgtgaagctgccattgcgtggctcagtggataataccgttcgcgatatcatgggcgggctgcgctctgcttgtacttatgtcggtgcttctcatttgaaagagctgaccaaacgcaccacctttatccgcgttgctgagcaagaaaaccgcgtatttggcagtaactgagctaaataaacttaatcggtttacgctgaacgagtgttttatatcgctgatagtgtgtgattaattgattattaaagaagggacgcaaaatgatgcgtccttttttaatctactgccaaacccaaacccaaacccaaacccaaacccaaacccaaacccaaacccaaacccaaacccaaacccaaacccaaacccaaacccaaacccaaacccaaacccaaacccaaacccaaacccaaacctggaacttttgttaactaataattcccccaagttggaaaatggggaggtacatagcaataaccagtgtgccaatcactgcgccgacgaacagcatcaacattggctcaagcatttgtgtcaacttatcagccagttcctcagtttgctgctgttgccaaccagcaagctttgtcagcacgttatccagtgagccagattcttccccaatgcgtactaactgttggcaaagtggagggaaaagaggttggtgtgaaagggcatcactcagaggtattccttgattaattagctgataaaaatgattgataatggatttgtaatgcagattatcaatggaagtagcggctgcttccagcccattagctaaggttaaacctgctttctgtgtgacagataaagtgcgaaaaatttggctgagacagtaccctttaaccagtggtgctatcagcgggagatgtaacagcaagaattgctctcgttgtttccaccgtgcgcttacccttattttagagatgtaaaccaatacaataccaatgattgccacgatagagtaaataccgtaattacccagtattccggatagatatagcagcccttgagtcagagcgggcagtggggcgtcaaaagtctgatagagccgcccgaattctggtaaaacaacaagtaacatcagggcactgacggcgaaagcaaccagacaaacaaaggcggggtatctgagtgtcttagccacttttttttgcaggtactggcgtttttcctgttgctcggctagctggagacagcatttatctatctcacctgttagttcgcctatggcaattaattgcgcgtatatggctgggaaaacggatggataggcgtttatagcctcagatagcgcctgcccttgagacaggctttcacttacatctcttagtaaacagcgccatattggcgtctcggcctctgctgccaacaattgcagactatttattaacggcagtccggcttgcagaagcgtagctaattggcgtgtgaaattaagcagatgcttcccttgatgtagccgagagcttaggcgttttatcattctgatacggataggctgcagcccctgctgtattactctttggtaaatcaccgatttttcgctagctagagactcgccgacgatcacctttccttcgctatctatgccttgccagataaataaaccgagtgtcattgcattccccttaatggcgtcagatttccgacaactcgtgagatttcggcgatactggttattccctgtttaaccaacgctaagcctgcgatgagtagtgaatggggctcagggggcggctgagaatttttcaggccaggaacaggggctgcactcattaaatcctgctgatttgacggtgtcattgcccatgtgtcatagatacctattcggccatagtaaccgctactacaatgttcgcaaccagtggcataccagtgatgtaaaggctttgggcacaaaattgtgggcagaatgactggctcgggtgctgcgcgtttacaacgttgacatagacggcgtaccaggcgttgggctatcaccagttttaggcaagatgcgagcagataatgactgattcccatttgagttaatcgggctagcgtttcatgcgttgaattggtgtgcaaggtcgaaagcactaaatggcctgttagtgcagcccttaccgcaatatcggcggtttcattatctctgatctcgccgatcataatgacatccgggtcctgcctgagtaatgcacgtaacgcctgagaaaagtctaaatctattttactgttggtctgggtttgattaatgccttcaacgggaatttcgatcggatcttcgacactgcataaattacggtactgctgatttaggtgttgtagacagctatacaaggtcactgtttttccgcttccggttggcccggtaaccaaaatcaatccttgcggtaaacttaaggcctcaaggattgattcccgactttttgggggaagatccagctcgtccaatcgttgcggtatattggtattcagaatgcgtagtaccactttttcgccgtattgagttggtaatgtggcaatgcgcagtgagtagtaatgattatcaaggctaaggctaaactgtccatcttgaggtaagcgccgttccgcactattcagcttagccattactttgagacaggcattgattctattaaccaaattagccggtggggatagcgtttggtgcaaaatgccatcaatacgtaaccgaatacggtaatagcggcgataaggctcgaagtgaacatcagacgcacgtttttgaatcgccatgcgtagcgtttgatgaatgatgttgataatgggcgcatcactttcatcattaagtgaagtcacttccttattatcaaaagcttgagtacgtgatttgtccgtatcagggaggtattttatggccgcttcttccgcgtgttttttactctcgatatctggcttaatcgagccgtttaactgctggattaaatcaggactcaaatgatgaaggtggtgctcaatttttgccgcaggccatagagtcacttccacatttaaaccgcaggcaaagcgtaatgcatttatctcctcactggttgggtactgcaacatggcaagagttaatgtatttgggctgatttccaacggtatcgctcgatactgctggcaaagccgggataacgcatccccggctcctttgttattgattgagcggttgctattcatcgtcgctagacgtctctttaagagcaaataccgacttgcagagtttacttagttcgtcatgatttcctgtacatgcgcgtgtccaggcaaggttaccggcggcgcttttagttggggttaatacaacgcttaatccatccagagtctcctgcccggtcatagagatgaccccttttgcaatgttaatggctttgacataacgagtaggttggccagagggaataccctgactaccagcattgcagcctaataatgccgagtgttccatcgagcaaacctctacggccatgcggtaaggagcactggtttgcaacatatcggttagggccgctttctgtatatagctttgataagcaggaataccgatgccgccgagaatggcaatgatgacgatagaaaccatgagttcaatgagggtaaaaccctgtgagtaatacattttcacactccttgtgatgaaagacgaggtaagggtgcggttttttttatcgcagggaaagtgggtttgaataggactgcgaaacggattgtgagaattttttagtgttgcagtaatcagcggttttttttcggcagaggccgcaaaaaagagctcattgttacctgagctcttttcctggctgaaacaaatctgttagcgttattgaaaacgcatcgagaggtctaaggcggtaacgtgtttagtcagtgcgccgacagaaataaaatcgattcctgtttcggcatagctacgaagtgtctcgagtgtgacattacctgagacctccaactgagcgcgacctgcgttgagggatacggcatcacgcatcataggaatggtgaagttatcaagcatcacgatatcggctccggcatccagagcctgctttaattcatctaaagattccacttcgacttcaattgggacatcggggtggatccaaaatgctttactcacggcttctttaatcgaaccggcggcaataatgtggttttctttaattaaaaaggcatcagtcaacccaagacgatgattgctgccacctccgcataacactgcgtattttaatgcggttcgtaagccaggtagtgttttacgagtatccaggagttgggtatgcaacccttggagtaaagcaacatagcggctgacttcggtggctacgccggatagcgtctgtacaaaatttaatgcggtacgttcgccagtgagcaagatgcgagcagggccggaaaggtggcacaacgtttggttggcggtgagcgcgtcaccgtctgccaccagccactcgacttcaactttaccgccgagctggataaagacttcgttcagccagcgttgcccgcagaaaacgccggcttcgcgagtgataatagtcgcggaggcttgtttatctgcggggagcagttgggccgtcaggtcgcgatcggcattgacctcaccgcctagatcttcactcagtgccaaggcaactgaaaagggaatatcgctttgaattcgctctaataacgcggtgcggcgactgtcggcactgtagctacgtgtcggcatagaaaactccgaaatggcggatagataatagttcaaacatgctactctgttgctggcgtcagtgctactacagagccgttttagaatgagggttgaggtgacaaatgcagttagagaatggctggattgttggggttaagcgggtggtttctcctcattttgatctcagacctgaagatgaggctccctctcttttggtcattcataatatcagtttgccgccgggtgaatttggtggaccttatatcgaccatctgtttaccggaactttgaatgcggatgaacatccttattttgctgatattgtgcacttgcgagtatcggcgcattgcctgattcgtcgcgatggtgaaattatccaatacgtgccttttgataagcgagcctggcatgccggtgtatctcaatttgacgggcgtgagcggtgtaacgatttttccattggtatcgagttggagggaacggatgtgctaccgtttaccgatgcgcaatatcaaagtctgaaaaaaatcagtgcgttgttgctatcccattatcccattaccctagagcggataaccgggcatagtgatatagctcccggccgaaaaaccgatccggggccagcatttgactgggcgctttatcgacaaagtttgactccattattggagtgattttgcagcaatagaggtcatgatagcggaggcgaggattccgtcatttttaccttttttgtgataaccgctgccgggaggcatggtgcctgaaggttcgggctggtggaatgtagagggagacagggaatcaatgacgctttttacgctattgctggtactggcctgggaacgtttgttcaaattaggcgaacattggcagctggaccaccggttggacactatttttagtcggttgcatcgatactcgttgctgcaaacgctcggtctggccattttgtgtatggccattgtcggtttgatgttgcagttggttcaggactatctgttcggcttgccgcggctgttactgtggattgttatctgcctgttgtgcatcggcgctggtggtataagaaaacactatcgtgcttatctgaaggccgctcgacaaggggatgccaatgccagtctgcaaatggcggaagagctggcattaatccatggattgcctgcggactgtggcgaaaaggaccgactacaagagttacagaatgcgttgttatggattaatttccgctactatctggctcccttgttctggctggtggtttgtggtttttatggcccggtagctattacgggctacgcgatgttacgcggataccaaacctggctggcgcgtcaccgaaaccctttgcagcgctctcagtcaggcattgaccgtgttttacactggattgactgggttcccgtccggttggttggcgtggcatacgcactgcttggtcacggcgagcgtgctttgccagcgtggtttgcctctttgggggacttgcattccccgcagtatcaggtgctcacccgtttagctcagtattctctggctagagaaccgcatcttgacccagtacaaacgccacgcgcggcggtatctttggcgcggaaagtcacgttgacgattataattgtcgtagctttgctcacgatctatggtgcactggtatagcgggcattagaggcattctcgataaaaatgactgctatctgacaaggtagctttgtaaataaaacatcggattggcagcaagagcccatcaaaataagtgtatgtcggcttcgttggttttgtaacaggaaacaatgaaatactgagaattcaacgagtttattacggagtttagagtgtattagcgctagctttcagttattaatggggagtattaagtgaacaaggcaagcgaaatacaggcagggaattgtcggattgaggcggttgagcctgatggttttttgctcctgatttcccctacacattagttcgctttcggcttgggtaataccagacactcatggccgtggaatgggtaaagatgtcaccgcagcgggagttttaagctcctttataatacggtgatttccgcggtaattggctgattttctctggtgttgcgagagaggttaggcgtaatttctcatgtgaaaacaatcgttaatcgttaatcgttaatcgttaatcgttaatcgttaatcgctaatcgctaatcgctaatcgctaatcgctaatcactaatcactaatcactaatcactaagcaaatgactttcgatgaagctcagtaagcggctttattgctctatgagcaattaaaaaacaggcccacagtatgaatgcgggcctgaaggttggtgcttatcgctataaatcagatgccgcaaagcgacgagcgattaagatttattctgcttaactcggtttttcagcatataaccaaccgctagcacgacgacccagacggggataagcaagacggaaatctgaatgcccggtgtcaggtacatgataaccaaaatgcccgccaggaaagtgaggcataggtagttgctgaagggataccagaaggctttaaacttaggctcaattccttggcggtttttcgctgcacggaattttaagtgagcaaggctaatcattgcccagttgatcaccagcgctgaaaccactaacgccatcagtaattcaaatgcccgtccgggaatcagatagttaatcaatacgcagaatgcagtcgcaaaggctgaaacagcaatagcaatgaccggtacgccgcgaccatctacttttaataaagcttttggaccgttcccttgcttggctagaccaaacagcatgcggctgttgcagtaaacgcagctgttgtacaccgacaacgcggcggtaagcactacgatattcagcacagtagcgacaatattactgtccaaagcatggaaaattagtacgaagggactgccgccctcaaccacttttccccaaggataaagtgagagcaatactgcaagtgaaccgatataaaacagtaagatacgatagataacctgattggttgccttagggatgctgcgcgcgggatcttctgcttctgccgcagtgatgccgaccagttcaaggccgccgaaggagaacataatcaccgccatcgccatgactaacccaatgaaaccattagggaagaagccaccctgagcccacaggttggtgaccgtcgcttctgggccaccctgtccgctcaacaacaaatagccaccgaatacaatcatcccgatgatagctaccactttaatgatggcaaaccagaattccatttcgccatacactttaacgttagccaaattgatagcgttgatagcgaggaagaatactgcggcggaaacccaggtcgggatttccggccaccagtattggacgtaaatccccacggcggtcagttcggccatcgcgaccaaaacgtaaagtacccaataattccagccagaggcgaaaccggcgaagttgccccaatatttataggcaaaatggctaaatgaacctgcgaccggttcttcaacgaccatttcacccagttggcgcatgatcagaaaagcgataaagccgccgatggcgtatcccagcagcactgaagggcctgccatttttatggtttgtgcaataccgagaaaaagccctgtgccaattgcgccgcccaaggcgattagctggatatggcggttttttagaccccgctttagctccgcgccttcttgttgaacactcatcgttgcatcctctgtctttgtggctaatgcctaaatcgctatttgtggtgttgtgtaatcttgaaatgccgttgtctgtattgttttatttacgggtgttcattttgataatggtgccaatgactacccattacgtgagaatagtggtatgcgagaattattgcatctgctttttcaatggatcactcgtattttatgcatttaagaaatgctaaggccggtgactattcagggggcttcagaaatggcgagggagaaacggcggttttatagacattcttcggtgaaatgagaatttataaaatggtcaaaccagttttcaggggctcatattctcggtaataaaataaagagtgttatcggcgaatttaaattcatttttattgatttaataatcacaaatgcctcaactataacgcttcagcttgcctaattatccttttcataatcgttacaatttttcgggggtgagtaatggtattaccacctataggttaccactttgcggcataacattagtgaagttgttaaaatgtgctggctttcatgatttcggtcaatgtccgtatggacagctagtgaatactttgttactttatcgtcacgtttttgaaattggtattaccaattgactcagcgccattcgcagagacgaattcactcaatacggcttacagcgcgactcacataaattatggcctacaacaaaatacgccaacccaaattatcagatgttatcgagcagcagcttgagtacctgatcttggaagggacactacgtccgggcgagaaattaccgcctgagcgcgagctggcgaagcaatttgatgtttcccgaccttccttgagagaagccattcagcgactcgaggccaaaggccttctgctgcgtcgccagggaggcggtactttcgtccagacgaacctgtggcaaagctttagtgacccgctggcagaattgctggccgaccatcctgaatcacaattcgatttgctggaaacacgtcatgccctcgaaggtattgccgcgtattacgcggctttacgcggtacagatgaagatctgcaatgtattcgtgaatgtcatactgcgattcaacaggcgcaagacagcggtgatttagacgctgaagctgatgcggttatgcagtatcaggtggctgttacagaagcggctcataatgtggtgttgttacatttactgcgttgcatgggcccgatgttagaacagaatgttaaacagaacttcgaattgctttactcgcgccgcgaaatgttggcaacggtaagcagtcaccgcgccgggatattcgaggcgattgtggcccgcgagccggaaaaagcgcgcgaagcctcacaccgccacttggcgtttattgaggaaatcttgctggatcttagtcgtgagaacagtcgccgtgagcgatcgctccgacgcctccagcaacgcaaggattaagggcttctcccagtcgggatgggttctaagtgcttattttgagcactaaaagcggcaactaaactgatgagcctatcttccggtgctttcaccagggcgcgtgttttaacctggtttaatcactctggttaaaacacaggaagataggctccaaataaaccattagagacagataaggaataccaccatgtcagaacgtttaattaatgacgtggatccgatcgaaacccgtgactggctacaggcgattgaatcggttatccgtgaagaaggtgttgagcgcgctcagtatctgattgatcaggttttgggcgaagcccgtaaaggcggcgtaagcgtggctgctggttctgagaaccgcaactatgttaactccatcgcagtagaagacgaaccagcctaccctggcaacctggatctggagcgtcgtattcgctctgcaatccgttggaacgccgtgatgaccgtgctgcgcgcgtctaaaaaagatctggatctgggcggccacatggcttccttccagtcttctgcaaccttctacgaagtttgcttcaaccacttcttccgtgcgcgtaaccaaaaagacggcggcgatctggtttacttccaggggcatatctccccaggcgtttacgctcgtgccttcctggaaggtcgactgacccaagaacagatggacaacttccgtcaagaagttcacggcaaaggtctgtcttcttacccgcatcctaaactgatgcctgaattctggcagttcccgaccgtttctatgggtctgggtccaattagcgccatttatcaagctaagttcctgaaatacctgtctcaccgtggtttgaaagatacctcagcacaaaccgtttacgccttcctgggtgatggcgagatggatgagccggaatccaaaggtgcgatcaccatcgctacccgtgagaaactggacaacctggtcttcgttatcaactgtaacttgcagcgccttgatggcccagttaccggtaacggcaaaatcatcaacgaactggaaggcatctttagcggtgctggctggcaggtactgaaagttatctggggcggtcgttgggatgagctgctgcgtaaagataccagcggtaaactgattcagctgatgaacgaaacgctggatggcgactaccagaccttcaaatccaaagacggcgcttatgtccgtgaacacttcttcggtcgtttcccagaaactgctgcattagtgaaagacatgaccgatgacgaaatctgggcgctgaaccgtggcggccacgatccgaagaaagtctttgcagcactgaaaaaagcgcaagataccaaaggcaaaccaactgtaatcctggctcataccattaaaggttacggcatgggtgaaacggctgaaggcaagaacatcgctcaccaggtgaagaaaatgaacatggacggtgttcgtcacttccgtgatcgtttcaatgtgccagttgctgattcagaaatcgaaaaactgccatacatcaccttcgagaaagattccgaagagtacaagtatctgcacgaacgtcgtcaggcgctggaaggctacgtgccaagccgtctgcctaacttcacccagaaactggaaatgccagctctggaagatttcagctccttgctggaagagcagaacaaagaaatctctaccactatcgctttcgttcgtgccttgaacgtgatgctgaagaacaaatcgatcaaagatcgtatcgttcctatcatcgctgatgaagcgcgtacattcggtatggaaggtctgttccgtcagatcggtatttacagccctaacggtcagcagtacaccccgcaagaccgcgagcaggttgcatactacaaagaagacgagaaaggtcagatcctgcaagaaggtatcaacgaactgggcgccgcttcttcatggttggccgcagcgacttcttacagcaccaacgatctgccaatgattccgttctacatctactactccatgttcggtttccaacgtattggcgatctgtgctgggcagcgggtgaccaacaggcgcgtggcttcctgatcggcggtacttcaggtcgtacgactctgaacggtgaaggtttacagcacgaagatggccacagccatattcagtcactgactatccctaactgtatttcttacgatccggcttatgcttatgaagtagccgttatcatgcatgacggcctggtacgtatgtacggcgacgctcaggaaaatgtttactactacctgactacgctgaacgaaaactaccatatgccagctatgccacagggcgcagaagaaggtatccgtaaaggtatctacaaactggaaactctggccggcgagaaaggcaaggttcagttgatgggttcaggcgctatcctgcgtcacgttcgcgaagctgcacagattctgtctgaacagtatggcgttggttctgatgtgtacagcgttacttccttcaccgaactggctcgtgatggtcaggactgtgagcgttggaacatgctgcacccaaccgaaactccacgcgtaccttacgtagctcaggtaatgaacgaagcgccagcggttgcttctactgactacatgaagctgttcgctgaacagattcgtaactttattcctgccagcgagttccgcgtactgggtacagatggtttcggccgttctgacagccgcgagaacctgcgtcaccacttcgaagttgattcttcttatgttgtggttgcagcactgggtgaattggctaaacgcggtgacatcgacaccagcgtagttgcagaagcaattactaagtttggtatcgacgccgataaagttaacccgcgtctggcataagaggtaaagaacaaatgtctatcgaaatcaatgtaccagacatcggtgcagatgaagttgaagtcaccgaaattatggtgaaagtcggcgataccgttgaagttgaacagtcgctgattgctgtagaaggtgataaagcctctatggaagttccctcacctcaagcgggtgtggtgaaagaaatcaaagttgcggttggcgataaagtcgaaactggcaaactgatcatggtcttcgaatccgctacaggtgcctcagcggcacctgccaaggcagaagagcaagcggctgctccagccccagctgctgcacctgcggctagcgcagcgaaagacgttgcggtaccggatatcggttctgacgaagttgaagtcaccgagatcatggttaaggttggcgacagcgttgaagctgaacagtctctgattaccgtagaaggcgacaaagcctctatggaagttccggctccgttcgctggcatcgtgaaagaaatcaaaatcaacaccggcgataaagtgagcaccggttctatgattatggtcttcgaagttgcaggtgctgcggcaccggcagcagcggcgcctgctcctgcagccgctcctgcagccgctccggctgcgccatcggcttcagcggcgaaaaacgttgaagtgcctgacatcggcggtgacgaagttgaagtgaccgaagtgatggtgaaagtgggcgataaagttgccgctgaacaatccttgatcaccgttgaaggcgacaaagcttccatggaagttccagctccatttgctggcaccgtgaaagaaatcaaaatcagcaccggcgataaagtgagcaccggttctatgattatggtcttcgaagttgaaggcgcagctcctgcggcagctccggctccacaagcagcggcacctgcggcagcggctccggccaaagcggcagcgccagcagccaaagcggaaagcaaaggtgaattcgcggagaatgcagcttacgttcacgctactccggtcgtgcgtcgtttggctcgtgaattcggcgttaacctggcgaaagtgaaaggaactggccgtaaaggtcgtatcctgcgcgaagacgttcaggcatacgtgaaagatgcagtgaaacgtgctgaagctgctccggcagcagcggctggcggcggtctaccaggcatgctgccttggccgaaagttgacttcagcaagttcggtgaaatcgaagaagtggaattaggtcgtatccagaaaatctctggtgctaacctgagccgcaactgggtcatgattcctcatgttactcagttcgacgaagcggatatcactgacgttgaagcattccgtaagcaacaaaacgttgaagctgagaagaagaaacaggatctgaagatcaccccgctggtgttcctgatgaaagccgctgctaaagcattggaagagttcccacgctttaacagctctatttctgaagacggtcagaaactgacgctgaagaaatacatcaacattggtgtggctgttgatacgccaaacggtctggttgttccggtcttccgtgatgttaacaagaagggcatcgttgagttgtctcgcgagctgtctgttatctctaagaaagcacgtgacggcaaactgaccgcatccgatatgcagggcggctgcttcaccatctccagcctgggcggcatcggcggtacggcgtttacgcctatcgtcaacgcaccagaagtggctatcctgggtgtgtctaaatcatccatgaaacctgtttggaatggtaaagagttcgcaccgcgtctgatgttgcctctgtctctctccttcgatcaccgcgtgattgatggggcggcaggtgctcgcttcgcagcttacattgccaccattatggctgatattcgccgtctggttatgtaatagcttaggccggcctagcgccggccttattattacttagcttatggttatatcactgatagttatgaaccgaccttgtttcgctcgttacattagtagacaaggttgttgagacactcgtcacgcgatgcggcttttcagtctattaacaattctgtaaactgctcgcagtgtaagcgtcccggtggatgaagggcgttatgaactttattagcctaataaatgacgtctgacccgccggacaaacaattaagaggtcatgatgagtactgaaattaaaactcaggtcgtggtacttggggcgggcccagcaggatattctgctgcttttcgttgtgcggacttaggtctggaaactattctggttgagcgttactccactctgggtggtgtttgcttgaacgtgggttgtatcccgtcaaaagcattgctgcatgttgcaaaagtgatcgaagaagccaaggcgctggctgagcacggcattgtttttggcgagcctaagactgacattgataaagttcgtgtctggaaagataaagttatcaatcagttgaccggtggtttggcaggtatggctaaaggccgtaaagtcaaagtagttaacggtttcggtaaatttaccggtgcgaatactttggtcgttgaaggtgaaaatggtccaaccaccatcacctttgataatgccattatcgctgcgggttctcgtccgatccaactgccattcattcctcatgaagatccacgcgtgtgggattcaacggatgcactggcactgaaatctgtcccagaacgtctgttggtcatgggcggtggcatcatcggtctggaaatgggtaccgtttaccatgctctgggttcgaaaattgatgtggtagaaatgttcgatcaggtgattccagcggctgataaagacgtagtgaaagtattcacaaagcgtatcagcaagcagttcaacctgatgctggaaactaaagttacagcagtagaagccaaagaagacggtatctatgtaacgatggaaggcaaaaaagcgccagcagaaccacagcgttacgatgcagttctggttgcgattggccgtgtacctaacggtaaactgctggatgcgggtcaggctggtgtagaagttgacgagcgtggtttcatcaacgtcgacaaacagctacgtacgaatgtaccgcacatctttgcaatcggtgacatcgtgggtcagccaatgctggcacataaaggtgttcatgaaggccacgttgccgctgaagttatcgccggtatgaagcactacttcgatccgaaagtgattccatccattgcgtacactgaaccagaagtcgcatgggttggtttgaccgagaaagaagcgaaagagaaaggcatcagctacgaaacctccaccttcccgtgggcggcatctggccgtgctatcgcttcagattgcgcagacggtatgaccaaactgatcttcgacaaagaaactcaccgtatcatcggtggtgctattgtcggtaccaacggtggggaactgttgggggaaatcggtctggcaattgagatgggttgtgatgcagaagatctggcattgactatccatgctcacccgacgttgcacgaatccgttggtttggctgctgagatttacgaaggtagcattaccgacctgcctaaccctaaagcgaaaaagaaataatttctgattgctgatgtgttagttaaagcggctcctgattcaggggccgttttttattgggaaaaatgtgtcaatgaacggaatcagttaacctgcggtactggcggcaatggttcatcggtaagagccagcatgtcgaccttgaagcttgagccatctgctgattcttctatatttgtgacaaggaaacggcttttaggcaagaagatacgctcctctccaggctcgtcgagtaattcgctgatatcagtgctgttggtgcgttcaagaaaatattttatggtatatctgacgttgatttttccctcttccagctcttgactattgaattggtcgataagttcttcatccgcggtagtgcttaagaatgtatctatttgaatggtttcttcaggtataactttagataagaactctgcgcgatctctgacttcccctcggtaaacttcgctaacgctgctctcttcttcggaaataatatagccgctctcacgtaatgagacattaatatcagaatggttatctaatgctgtgtagacttccgttatttctgtttctaaaccatcattagtggttccatttctcagagcattatttatggccacaaatctatcttcctgaaagtttctaatggcaaagtattctcggaagtttattttttcatgtgaaaagtttgaattatagcgttgtatttcatcgtcaatatttaggttgcattcatctaatttcgtttttccatatataacttcaagttcctcttttattgttgaagtatcattaggtgttatcggtgccatttggtcaattctattcttgtccatcataagattcccttcaacatcataggcatctaccgaagtagaagagtcgtaagaggatgaagaagccgagtcggttgatgaagagttgctgttatccggcggttttattctggggattttagggggaggttcatcacttaaagtggggggatgggtatcaccgaacaggaaaccgaccttgccatttactctctgtagtcgatccgaaattttgggtttaggcttcgatgcggcgggtaatagcggggttcgctctggattgactccgatttgtgagcctggcctagcgatactgactctgggttttgctgccgtagtcgctccgggcttggcaccaaaggtgactttaaaccctctgggctgcggggttgggcccatacttaatacgccgagactgatttcaaacgcgatttcttcgtcggttttgggcggtgctttcccctgatctttcgggacggttttacaaggaactccgcgttcccatttacaatggcgtgactgaaaattggaccagctttctttatttgattgccatctaggttgagcttctcgtccatgggaaatattcaatgctaatgttgtaaataataaagttgaaaatgttatagttaatttcatattcactccttatttgatgagaacgcttttataatataaataatgttataagcacggcctagggtttcaaaattagcattgaattgtaaatttgaatttataaggtaagtggatttgattttatataatgactattacgtatgacgattaattaactgtattatattaattaaggataaaaaccttcacgaatttgcctcggagtgatattaaacgtgcgacgcagtgcggtcgcaaaatttgcggagctggtatatccggcaatggcagcggcttgatcgatactgactccttctttttttaaggccagcatggcgcgcttcaatcggcaatggcgcaaatactcaaataccgtcacgttataattctctcggaaacggcgttgcagcgtgctgggactcatattaattgactgagccagttcttgcagtgaaagttggtcggcttcgccgctttccagccagtcacgtaactgttgaatccgattcaagccacgcagagatattttgttttgctgttggcttgattgttccagtgagctgaatgcctcgataatcagaccgatacactggctttcacatcgtaaccgctccagtggcgtgcggtaggggggcgcacttgctatttgctgggcgatggaaatcgcctggacagatggttgccataaatgaattgccagatgttgctgagtgaagtcgtacagtttctcccatcctccttcctgcggcagcaaatccccatatagccattcgcggtcaaaggtcagcgttaaagtgcgttcatgaccatttttctttccatgccgggtaaataaggtgttctcaacgagagaaatcagagaggaaggccctttctcatgtagctctaatggtttgccaccaaaggatatattcgcgctgccgctcaccacgatagccagtttgagtgagggcgccagacagttctgcgttttgatgtcgtaaagattagtgacattcgccgtatgcagaattaaatgggggttgaggcgcagtacctggaaatcaccaaatagcaccgggtcagtgacagaggatttccctccgcttagacgatagtcgctggcgaccaaattggattgttgcacaatttgctcgggatagatgggtttagaagaagccgaaaccttgcgcatactattttttttcatcgcagacaagatgagccccccttgagcattgtctccatactttttacccgatgacattgacgctgcggcaaagagctttgccgttttcacaaacctttttcctgtagcgcaatgtaacaattagcgcgccgaatgggtaatgaaaataattatcaatcttgtttgtttttgttggctcgttaatcagtcgtcggggactctctccgccgcgatgtgttgcgggcgccagcactagggaaatttttataatgatgaatgtcaaatggcagcggcgctacctggcggccatgatcggcctgtgtctctccacaccgttgtgggcgcaagctcaaaataatatcaaaaccggtacggataccacgtcaaccgaacaaccggaagccactgctacatctacatcgaaaaaaaccaatgcgctagccagtggcgacactttggtggtaactgcagagcagcaggtacgacaggcgctaggcgcttcggttatcaccgcggaagatatacgcaaacggccgccggccaatgatttatccgaaatcatccgaactatgccgggagtgaatctttctggcaattccgccagtggtcagcgcggcaataaccgtcagatcgatattcgcggtatggggccggaaaacaccctgattatgatcgacggcatccctgtttccagtcgcaatgcggtacgttacggctggcgcggcgagcgtgatactcgcggtgataccaattgggttcccgccaatatggtagaaaaaatcgaggtgttgcgtggtcctgcggcggctcgctatggcaatggtgccgccggtggcgtggtgaatatcatcactaagcagccgaacaagcagctacaaggtagctggaatgcttatatgaatgtgccgcagcacagtaaggaaggggcgacccgtcgcactgactttagcctgatggggccactaagcgatacgctcagcttccgtttatacggcagatacaataaaaccgatgccgatgagtgggatatcaacgccggtcatgagtcattgcgcacgggtaatcaggtcgggactttacctgccggacgtgaaggcgtacgtaataaagatatcaatggcttattgcgctgggatttcagtcccggtcagtctctggaattccaggcaggctatagccgtcagggaaatatttacgctggtgatacgcaaaataccaacagtaacgccattgtgcgcagcctgtacggtgctgaaactaaccgcatgtatcgtgagaatgtctcggcaacccaccgcggattctgggatagcggcgttagcactacgtcttatcttcaatatgaagaaacccgaaattcgcggatcagtgaaggtttggccggcggtaccgaaggtattttctcaaaccgcggttttaataccatcaccctggataattacgttgcgcacagcgaagttaatctgccgttcgagtggggcgtaaatcaggtcgtgaccattggggcggagtggaacgatcagaaaatgcatgatccagcctccaatactcaaaccacgaccgaaggcggtagcgtaggcggtttgaaggattccgggcgcaatacgcgcacatcggcgcacattgcttctctgtttgtggaagataatatcgaactgacggaaacgaccatgttgacgccggctgtgcgctacgatcatcacagcaaagcagggagcaactggagcccgggggtgaacctttctcaggcgttgggcgataattttacgctgaaaatgggtattgcccgcgcttacaaagcgccaaatctgtatcagaccaacccggactatctgctatatagccgtgggcaaggctgttacggtggcggcgggagttgctatttaatggggaacgagtctctgtcggcggaaaccagcgtaaataaagagatcggtctggaattccatcaggatgggctgattgctggtgtcacttacttccgtaacgattaccgtaataagattgagccgggtttgatatcaataggtaatgccagcggtgggacaggcgcctacgtggattcagatattttccaatgggaaaacgtgcctaaagccctggtggaaggtctggaaggcagcctgacggttccggttactgatgatgtgcagtggagcagtaacctgacctacatgctgaaatcggagaacaaaaccaccggggattatctttccatcacgccagagttcaccttgaatagctctctgagctggcaggcgacagacgatttatcgttaatgaccaatgtggtgtggtacggtcgccaaaaaccgaagaaattcgactatcagggaaatctggtcacaggtactgcgaccagagaagtcagtccttacgcggtatttggtctgagcggcagctatacgctgactaagaatgtcagtgtcactactgggattgaaaatctgtttgataaacgccagttccgtgcgggtaacgcgcagagcgtggcgggtattgaaggtgccggagccgcgacctataacgaaccgggacgcactttcttccttagcctgaatacgcagttctaatcgttaattttattgaataaaatcgatagcccgtagcgatacgggcagtttttgataacaaatatccgcgcaatcaatcatctgttaacccccagtgacaggctagaaataaagctacttcacgagtgaaacagcaaatggttttgggctatcaaactcccaccgcctgatttcttaaccataaaaattgaccgttatcggattgaccttattttctgctccctatgctaacccttactcctatcagcctgatccgcaatacataacctgcacggagagatagtatccattgcaaaaatatggttattatgttgcggagtatttatcaccgaaaccacttggttagccacgaattgatattccaaacaaatttttcaggtgattacactgtgctcaacgattcagcaaaaatttaatgttgcttttatgtgaacgaattaacaaccagttcagatcctgatatgctggctgcgcagaaccgggcacttaccctacaactttaggcatcgatttcggtgaccggagagaacggttagccaggcaaaataaatgataatgaaagcgaggagaatgtcgtgctagaagaataccgtaagcacgtagccgagcgtgccgctgaggggatcgtcccgaagccattggatgcatctcaaatggccgcgctggttgaagcattaaagaatccgcctgtgggcgagcaagaattcctgttagacctgctgattaaccgcgttccacccggcgttgatgaagcagcctacgtaaaggccggtttcctggccgccatcgccaaaggcgacgcaacctctccactgattactcctgaaaaagccgtcgagttgctcggtactatgcagggcggatataatatccatcctctgattgatgcactggataacgaaaagctggcacctatcgccgctaaagccttatctcacacgttgctgatgttcgataacttctatgacgtggaagaaaaagccaaatccggcaacccgcatgccaaacaaatcatgcagtcctgggccgatgcggaatggtatctgtctcgcccggcgctggcggataaaatcaccgtgacggtgtttaaagtgaccggtgaaaccaacaccgatgatttgtctccggcacctgatgcctggtcgcgcccggatattccgttgcacgcactggctatgctgaaaaatgctcgcgaaggcatttatcccgatcagccgggcagcgttggcccgattaaacaaatcgaagaactgaataagaaaggttttccgctggcttacgtcggtgacgttgtgggtaccggttcttcccgtaaatctgccacgaactcagtgctgtggtttatgggggacgacattccttatgtgccgaataagcgcggtggcggtgtggttttgggcagcaaaattgcgcctatcttctttaacacgatggaagatgccggggcattaccgattgaagttgacgttgccaagctgaatatgggcgatgtgattgatatcttcccgtatttgggtgaggtacgtcggcacgataccggtgaagtgctggcgacatttgaactgaaaaccgatgttttgctggatgaagttcgcgccggtggtcgtattccgctgatcgtcggccgaggtttgaccactaaggctcgcgaagccttaggtttgccaccgagcgaaattttccgtcaggccaagccggttgccaaaagcaataaaggcttttctctggctcagaaaatggtcggtcgcgcctgtggcgttgatggtgtgcgcccgggtgaatactgcgaacctaaaatgacctccgtgggatctcaggataccactgggcctatgacgcgtgatgagctgaaagatctggcgtgtctgggtttctccgctgatttggtgatgcagtcattctgtcataccgccgcttatcctaagccggttgatgtgaccactcaccatacgttgcctgatttcatcatgaaccgcggtggggtttccctgcgtcccggtgacggtatcattcactcatggctgaaccgtatgctgttgccggataccgtcggcaccggcggtgactcccatactcgtttccctatcgggatttccttcccggcaggttcgggtctggtggcgtttgctgctgcgactggcgttatgccgctggatatgccggaatcggttctggtgcgctttaaaggcaaaatgcagccgggtatcactctgcgtgatttggtacatgccattccttattacgccattcaggaaggcttgctgaccgttgagaagaaaggaaagaaaaacatcttctctggccgcattctggaaatcgaaggcttgcctgagctgaaagtggagcaggcatttgaactggccgatgcttcagccgaacgttctgccgccggttgtaccattaagctggataaagcgccgatcgaagaatatttgaaatctaacgtggtattgctgaagtggatgattgccgaaggctatggcgatcgccgtactttggagcgccgcattactggcatggaaaactggctggctaacccgagcctgttagaaggggatgccgacgcagaatatgccgcagtgatcgaaatcgatctggccgagatcactcaacctattctgtgtgcaccaaacgatccggacgatgctcgcctgttgtctgacgtagcaaacagcaaaatcgacgaagtctttatcggttcatgcatgaccaacatcgggcacttccgcgccgccggtaagctgttggatcaacataaaggtcagctgcctactcgcctgtgggtcgcgccaccaaccaaaatggacgccgctcagctaacggaagaaggctattacagcatctttggtaagagtggggcgcgcgttgaaattccgggctgttcactgtgcatgggtaaccaagcgcgcgtggccgatggggcaacggtagtttctacctcgacccgtaacttcccgaaccgtttgggtaccggtgccgatgtgtatctggcttcagctgaactggcggctattgctgctttgttaggccgtctacctacgccggatgaataccagacttatatggctcaggttgataagactgcggttgatacttatcgttatcttaatttcgataaattaaatgaatatacagagaaagctgacggcgtcattttccagactgcgctgtaagctattttttgtattaatcattaattttactaataaattgaagggggccgatggcctcctttttattgccttgtattccgtgctacgggcgatttcctccgtgatttctgagtattactcgcgatagatcactctaggtttcgtttctgacagagtgagtgagcggcatttgattctctatttatcacctgttctccccgttgaatgccttgtcgaaacattagattatctttgttatccactgcaatagactacgctttcaaagcagccagcggctgtaagcgtgcgttaatcctttctttttcacagcggaaattacctaatgacgacacagacctccgattcatattcgataaaaaatcataataggatggcaggtaagcgtgtacttattactggtggtacatcgggtatcggtttggcagcggcaaagctaatgttgcagcagggcgctcaggttgcgattacggggatcacaccggaaagcctggagaatgcctgtaaaactctgcccgcagccagaatttatgccagtgattccggcagtattcagcaacagaggagattggctgaaaaagttaaacaggattttggtcagttagatgccttggtactgaatgcgggaatggggatttggcattcactggaagattggaccgaagctgattttgatcggcagatgtcagtgaatttcaaagggccgttcttcttactacaagccttaagacccttgctgagcaacccggcctccgtagtgataaccacttccattgccgctcatcgtggcttgcttggtgcgccgatttacggtgcttccaaggcggcgctgctggcggtaatgcgtggtttaaccacggagttggccggcgatggcatcagaatcaacgcgatttcacccggcccggtgaatacgccaatattgtataaacagggaatggatggggataaattccacgagcagtttacgccgctgcttccagtgcaacgtttcgctgaagccacagaaattgctcaggctatcctgttcctggcgtctgatgaatccagctacttgtacggaagtgacatcgtggtcgacggcggcctgatggcaacattccccggctaatgcagataagtaggatgcaaacctttcaaactgcggtttaagccgctatatttcgcatctaaatacgcggggggccaagggtctcccgtttttattgggtgtaatcgcaagatgttgcataactttgcgagcttggacttagttagcccgccaataatgtttaaactaatagtaagagcaataggagggcgtgctatggactatgaatttttgcgtgatctaacggggcaggtaatcgtcagattctccatggggcatgaagtgatcggccactggctcaatgaagaaattaaaggtgacctgactaaactcgatgagatcgagaccgccgcggctcaggtcgccggtagtgaacgccaatggcagcaggtgggtcatgaatacactttgtggctggacggtgaagaggtgatggttcgggctaaccaacttgattttgaaggcgatgaaatcgaagaaggtatgaactattacgatgaagagagcctctgcatgtgcggattagaggatttcctcgccgtgttaaaaggctaccgagcctttattctgaaatattgatttttatttttctcttggtgaggctggcgatcggctggcagaccaacacagcagcgaaccggctaccaccattccgacgcccgggagaaatgcggctgacggcggcgtactgagccataaactggcgatcagtactgacagcaaaggcgtaaaatatgaaagggcagcgaccaacgtggcgttgccctttttcatggcgctatcccagcattggtaggccagcgcagtactacagcccatcatcaacagctccatgactgcccgcggtgtaaaatgaagtggccccggtgtcagggtaaaaaacagtagccacaggcacagcgcacaggccagaagaaacagcggcagtacacctcggccacgactataaacacgcaccagattggagtaaatagcccaggcaaaggcagcgagcagcgctaagctataagctagcgggttatggttgatattcgtggccaagatactgatatccagaccatttccaccgctgacaacccaaataacgccgaataaggcaatggctgcccctaaccatagccaccagcgggtgcgtaaccgcagtagtacgacggcgaaaagcagagtgaggctgggccacagatagttgattaggccaatttccagcgtctgttggcgatcgctcgccattccgatggcaatagcaaaggcaaccatataaataacgaataacgcaccgcatccccataaatatgctggatgctgcccgcgaatctgcggtttaccgcccaccagccagaccagtattccgctgacgctatagatcgccgctcctgcaccaaaggggcctaaggtttcggctaacccacgcgtgagtgcgacactcatgctccaaagtaaaatagcaactatgcccaataatgtagcggtacgttccatgtcggcaggctcagcgtcggcgatgaaatatcagccagccagagtacgacattcgagcaggaaaaaatgggatgatgggttgatttatcgttgttttatcggaaagaaagcgtggcgaggataaaaaacacaggcaggaaaacctgcctgtgagccatttcgcgtcgatcatacttccggaacgttgcgcccgtagtagatttcctgcatttctttgtacagcaaacgagtgatggtttctctttcttcatcgctcagttgttctggcttggcgttaaacagatagtgcttcagatcgaagtctttcagcatcatcttggtatggaacatgttttcctggtaaacgttcacatccatcatgtggtacagcgacttcatatcatctgacataaagttctggatcgaattgatctcatgatcgatgaagtgcttcacacctttaacgtcacgggtaaagccgcgtactcgataatccatagtcacgatatcggattctagctggtggatcagatagttcagcgctttcagcggtgaaataacgccacaggtagaaacttcgatgtcggcacggaaagtacatagcccgccttcaggatggctttcaggataggtatgcacacaaatgtggctcttatccaaatgagcaaccacggagttaggcagcgggccgggatgttctgatgtatcgacatcacgaggatcgatgggctcttcgctgactaagatagtgacactggcaccctgaggatcgtaatcctgacgagcgatattcaaaatattcgcgccgatgatcgagcaggtttcgctcaagatctcggtcaagcggttggcattgtattgttcgtcaatgtaggcgatatagccatcgcggtcatctgcggtcttggcataacaaatatcgtaaatacaaaaactcaggctcttggtcagattgttgaagccgtgcagtttaagcttgtgcaatttagttcacctccttacggattaatactcaacgttttgtggaaagtgcattcagcagatactgtggcagggcaaagctaccgacatgaattgctggattatagtaacgacaggtcaggcctgcgtgttcaaaccgggcttgcagtgtagcgagatctaactgacgcagcgccgggttttgcgtagcccaggcaaaggtcatgataccgccgtaatatgtcggaatggctgcctgatagaaactgacatcgccgaaatagttgctgagttttttgtggctatcgacggcttcatcctgctggaggaaacacacgccattttgcgcgacgaaaataccgccttcgttcagactacgggcgcaaccttcgtagaatgccgaggtgaacaggctttcgcccgggccgattggatcggtgcagtcagagataatgacatcaaacttttcgttggtctgattaacgaagttaacgccgtcgtcgattaccagtttgaagcgcggatcgtcataggctccggcattgtggttcggcagatactggcggcagaattctacgacgccggcgtcgatttccaccatggtgatttgttcaacggtgctgtggcggctgacttcacgcagcatggcaccgtcgccgccgccgatgatcaacactttcttcgcctgaccgtgagccagcagcggaacgtgggtcatcatttcgtgatagataaactcatcgcgctcggtagtttgcactacgccgtccagcgccatgacgcggcctaaaaccgggttctcgaagatcaccagatcctggtgctcggttttctcgcggtacagaatattctctacagagaaatactggccgaaattggcatggagcgtttcataccaaagctctttctgggacatgttagggctctcctccgcggtaacagccatgaaaaatgggcgcaacatcatagccaactctgcccgaggttgcacggttgaatttcagacagaggctattagggcgaattattagttggcgtaggccaataaactcagtgaatcgcgtgccaggaatttgcatttggtgggaaccggaatggcgatgccgcgcaaatcgcgatagctctcttcacccaggtctttcatattgaagctattatagttacgtaaatcccaacggttctgctgggcaaaatacacaatcgcccgcttaatttccgtattaggtagttcgttgtagccgcaatcattcttcagataaacgaaaaccgcagtgagatcggcaagatcttctgcttcggattcggttaaagcttggctggcagatgaaaatccacacagagcgagcagcagcacgactaactttgttcttttcatggcggaaatttgcttatttaattgtcaataaacgttaacacatttggacagtcccacactaaattttcttatagaaccttggtgtgaacgcacagactgggttattgcctcttgaccttaccgcaaggggagggtttaggctcttcactaattatgtactgtgctgcattttctgcactgattaaacattttgaggagacgaccatgcttcgccgtgatttcatcaaattgacggcggctcttggagccgccacttctctgcctctctggagccgagcggcttttgccgctgagcaccctagtctgccgattcctccgttgctacaacctgatgccagcggcaaaatccaattacaactgcaaaccggtagcatggtgtgggttcccggtaaaacgactcaaacctggggagttaacggcggatttctcggcccggcgattcgcttacagcgtggtaaacctgtcactgtaacggtgaaaaataccttgccggaagcgaccacggtacactggcacggattggaaatacccggtgaagtagacggcgggccgcaggctctgattgagacgggcgcgacgcgagaagtgacctttaccgtcgatcaaccggcggcgacctgttggttccatcctcatacccacaataaaaccggctatcaggtggcgatgggattgggcggtctggtactgatcgacgatgacgaaagcagcaaattaccattgcccaagcagtggggcgtcgatgatattccggttattttacaggacaaattgctggataaagacggacagattgattaccagctagacgtgatgaccgcagccgtaggctggtttggcgatcaaatgctaactaacggcgcgcgtttcccgcagcagattacgccgcgcggttgggtgcgcttgagggtactgaacggctgtaacgcgcgatctctcaatctggcgttgagcgatgggcggccaatgtatgtgattgccagcgacggtggcttcctgtcggaaccggtagcggttaaagaactgccgattttgatgggagaacgcttcgaaattctggttgataccgccgatggcaagagtgtggatttagtcactctaccggttaagcaaatgggtatgacattggcgccgtttgatcaaccgctgccggtattacgtttacaaccgtcactggccgccggtagcaaagtactgccggatcaactggtagtgttgcctgcgctggcttcgcttgatggattgaaggaacgctggctacagctgatgatgaatcctcagctagatatgctcggaatgcaggcattgatgacgcgctacgggcatcaggcaatggctggtatgcgcatggatcagcacggcggcatggcgatgatggccgaaagtggtaagaacagcggcggctcaatgggcggcatggatcacggtgctatggggcatggcaacatggccggaatggggcacggggcgcaaaaggccgagagcttcgatttcagccacgccaacatgattaatggtaaggcgttctccatgaccgaagcggcgtttgatgccaaacaggggcaatacgagaaatggaccatctcaggtgaaggggacatgatgctgcatccgttccatattcacggcacccaattccgtatcttaacggaaaatggtcagccaccggcggcacatcgtcgcggttggaaagatacggttcgggttgaaggtgctcgcagcgaagttttggtgcgctttaaccatttagcgaccgccagccagccttatatggcccactgccatctgttggaacacgaagataccgggatgatgctgggctttaccgtcagcgcttaacccgattccccggaccacacgcgtccggggctatttaccttcataatcaactatctgccatttccttcacctgcccttattgcgcacgcgtcgcaactactttcccgctatgctaaactcagcggctttcttcaggtaaccgacgttaaaaacttatgaaacacaccgtagaagtaatgatttccgagcaggaagtaaaagcccgtatcgccgaattaggcagtcaaatcaccgagcattaccgcgacagcggcagcgaaatggttctggtcggcttgctgcgtggttctttcatgtttatggcggatttgtgccgcactatcaatgtttctcatgaagtcgatttcatgacggcctccagctacggcagcggtatgacctcaacccgcgatgtaaaaatcctcaaagatctggatgaagatattcgcggcaaagacgtgctgatcgtcgaagacatcatcgattccggtaatactctgagtaaagtgcgtgaaattctgcaactgcgcggcccaaaatctctggcaatctgcaccttgctagataaaccagagcgccgcgaagttgaagttccggttgagtgggttggtttcaagattccagacgagtttgttgttggctacggtattgattacgcgcagcgttatcgtcatttgccgtatgtaggcaaggtggtcatgctcgacgagtaatggtggtcggtactgcgcgttcgcactttaaggttgggaagtgctcgctatcctcatagacagaaagtccactccggtagctgcgcgccaggctagagtctgtagaaataaccaagggcacaatgtgcccttgacgtgttacatcgctttgccttgtaataatgtcgccatcgcttttcggtagaccatttccagactgcttaggctggtggccgaaacctctaaatcgcgcagcaaaccatcttcaatgccgtaaacccaaccgtgaatcatcgctttctgcccgcgtttccaagcggagcgcacgatagtggagtgaccaaggttgtaaacttgctctacgacgttgatttggcataacacgttgctacgttcttcctgcggtagctcgcccagcaaagagctatgtttgtaccacaggtcgcggatgtgcagcagccagttgtcgatcagccccatttcctcgcctttgattgccgcttcaacgccgccgcagccgaggtgaccacagataatgatatgttcgacctgcaatacatcaatggcgtattgcaccacggacagacagtttaaatcggtatggataaccagattggccacattgcggtgaacaaataattccccggacttcagtccggttaactgctccgcaggaacccggctatccgaacaaccgatccacaggaagcgcggtttttgcgcttgggccagatgctcaaaaaaatcaggatcttgtttgctgatggagtttgaccagctgcgattgttcgcgatgagcttttggatttcttccatcgatgttaataacctgtaataaacgaattgcgataggataatatacggcaagcattatgatttagaaatcggaacagttgtttcgggtgagatacaatgttgtccgcgtcacgtcttcctggcatttatcgggtttccctctgctccctgtgacttgtctctcgtcaaatcagcaggctaacccattgatatttagtcccgaaagacattcattgaataaggttcatgtttacttatgacatatgcactggaattaacgcagttgaccaaaacctacgctggtggcgttcaggcactgcgcggtattgatctatgtgttgaggcaggggatttctatgccttgctcgggcccaacggtgccggtaaatcgaccactatcggtattattagctcgctggtgaataaaacctcggggcaggtacaggtatttggttacgatattgataaggatatcgtcaatgccaagcgtcagctcggtctggtgccgcaggaattcaactttaatccgtttgaaaccgtgctgcagatcgttattactcaggcaggttattacggcgttacccgccgtgaagcgctggatcgcgcagaaaaatacctcagtcagcttgatttgtggggcaaacgcaacgagcgtgccattcgcttgtccggcgggatgaaacgtcgcttgatgatcgcccgtgcgctgatgcatcagccaaaactattgattctggatgaacctaccgctggtgtagatatagagctacgtcgttcgatgtggggcttcctgaaagagctgaatgcgcagggcaccaccattattttgactacgcattatctggaagaagcggaaatgctgtgtcgtaacatcggtattattcaaaacggtgaactggtggaaaacaccaccatgaaacagctattgagcaagctagaatcagagacttttatcttcgacctgggggcgaaaagcgccttgccgcagttggaaggctaccaatatcggctgatagatacttccacgctggaagtggatgtgaagcgcgatcagggtttgaacggtttattcagccaaatgagtgcgcagggtattcaggtattgagtatgcgaaacaaagccaaccgtctggaagagctgtttgttaatttggtcaatggcaacgggggagaaaaagcatgacccgcctgtattggatcgctctgcaaagtatctggatcaaagaagtgactcgatttggtcgtatttggattcagacattggtaccgccagtcatcactatgtctctgtattttgtaatattcggtaatctaatcggctcccgtatcggtgatatgggcggggtggattacatgcagtttatcgttcccggcctgattatgatggcggttattaccaactcttacgccaacgtggcggcctcgttctttggcgccaagttccagcgcagtatcgaagaattactggtagcgccggttccaactcacatagtgatcgtcggttatgtgggcggcggcgtggcgcgtgggatttgcgtcggtattttggtgacaattatttctctattctttgtacctttgcaggtacattcctggtcaatgatcgctttaaccgtgctgttaaccgcgattctattttctctggggggcttacttaacgcggtatttgccaaaaccttcgatgatatcagcctgattccgacctttgtacttacgcccttgacctatctgggtggcgtcttctactccttgacgctgttgcctcctttctggcaggcggtgtctaagctgaatccaattgtctatatgattagcggattccgctatggcttcctcggtattaccgacgtgccattggtatttaccattggggttttggtgctgtttatcgtcgtgttttatggctcagcctggtacctgattgagcgtggccgtgggttacgcacttaatttcaaccttcaggtattatcgttaaaaggacagcactgagctgtcctttttgctatttgcatcgttaaacataaaattctgaaactaaattaatcgtaataattaatgatcttagtgaatatggtctttctcacgctttagcatctcatgctatgctggcttaccagaactctctctttcattcagcgcagttacgcgcataagtagaacgataatgtggcataaaaacagaatagcgattgggatgctactcgttattgtcatgtcggtaatcattccggcagcccatgcagacctcctgcaagaagaaacggcagtgccttctaggtacatggtcgccgatcgtaacagtgaaatttatgcgctgattggtgagcatgtgattcccgttggcgaggttaaaaaagggcagctattacaggttttcccggccgcggcggaatattatgaattcaagtttggccacggcatcggttttattgataaagacgatctgcgtgagattaataaagcccaaaaaatgaatgacagattaggcgatctgaataaaccaacgcctaatcaaaatattctgaccaagcgtgcgaccaaaatttatcttgagccggataccgctagcgaagaacttggcgtattggaagagaatctgcgttacccgattattggcaaattgaaagatcgcctgaataacagttggtatcagatcaacattggcgatcgcttaggctatgttagcggcaatgaaactgaaattgataatggcattccggtgctgacttatcatcatatgctgaaaaatgaagagaataagcgctttaggaatacctcgaccaccacgtctgacgtggcgttcagtaatcagatggcgtatctgaaacaagctggttatgacactatttcgatgtatcagcttgaggcttacttgaataatcaaatcaatctgccggcgaaagtggtcgtgctaacatttgacgatggtttaaaatcggtcagccgttacgcttatccaattttgaaagaacagggtttccgcgctactgcatttattatttcttcgcgcatcaaacgccatccgcagaaatggaaccctgattcgctacagtttatgagtatttcggaactgaaacagattcaggatgtatttgacgttcagtctcacactcatttcctgcatcggaccgataacgcacgtcatccaatcttattgagccgctcttaccataatgtcatttttgattttgagcgatcccgacgggcattatcgcaatttaatccccacgtgatttatttgtcttatccgtttggcgggtttaatcagaatgcgattgaggcggcaaagaattcaggtttccatctggcggtgacgaccatacaagggaaagtcaaaccgggggataatccgtttaccttaaaacggctatacatcttacgcaccgattctatccctaccatggctgagcgcatcgccaaccagccgggagccgttgtagccaagactataccagcggtgattgaggctgagtaggtttgcgaaaccagtctcgtcgatcaaagagaaaggagcctaaaatggctccttttttacgtattgagtaagacgattatatcggctaacgaaagggcgtattgccgtgcctaaatcgctaggcaacctgcaccggaaccgctttggctttgcgctgtagttggttgtcgccttcgaaataggccactttaggatggtgcaaacgggcgtccacgtctgacatctgaacgtaagaacagataatcagtttgtcgccaacgcaagcgcagcgcgctgccgccccgttgacagaaataatgcgtgagccacgctcagccgcgatggcgtaagtagaaaaacgctgaccgttatcaacgttataaatatcaattgcttcgtattcgagaatcccagcggcttccagaaaatcctgatcgatggcgcaggaaccttcatagtgcaaatcagcctgagtcactttaacccgatgaagtttgccttgcagcatagtacgtatcatagccttacccttaaccctaatgtaaaccagcgaatctctgccaggcggagttctctggatgaataacgctgatggcgtcaatactgaggcagcctgcgttcagtatatcgactcagttttgccgattttataggtgctgtctatatattggcgaagcctaccgtaagataaattatgacgaagaatatttctgttggaagactaatggcatggggaataatcaagtcggatacgaactgagcacagagtattttgcttcaggccgtatccggtttatcggataaatgcgaggttagttgattaaatcaacctgctgattatcgatcaaacgggcttttcctaaccaggcggccataagaatcaccgcgcgctggctttcaacggtcagcggttgtagtgtttcagcatcacggataaacagctcatccggagtgaagcccgctgcgcgaagctgttccgccgtggttgccagcaattcatcaatctgacgctcgcccaaggtgagtttttcagccagatcgttcatgattttcgccaactgaggcgcaatcttgcgttcttctgcagtcaaatagccgttacgagagctgagtgccaaaccgtctttggcgcgcttgatcggcacaccgataatctcgatgtcatagcccatatcggctaccattttgcgaatcaacgccaattgctggtaatccttctcgccgaaacaggcgatatccggttggaccagattgaacagtttgctgacgatggtggaaacgccacggaaatgaccggggcggctggctccttctaaaatggtcgataaagcggggacatccacgtaagtctgctcttctaaacctgctggatagacttcgctggctgcgggagcgaacaccagatctacgccttggcgagtcagcttctcacagtcttcctgcagggttcgcgggtagttggctaagtcatccgggcgttcaaactgcatgggattgacaaagatacttaccaccactacatcggcacgggctttggcttcttccaccagagcaaggtgtccatcatgcagattgcccatggttggaaccaacgcaattcgtttgccatcctgacgccaacggcggatttcctgacgtaaaaacggcagggtttcgataatcagcattccctttctcctgagttattggaagcagtgctcttcagccgggtagattccctgctcaacttcctgaatatattgttggatcgccaaacggatatcgccagcctgagccaaaaagtttttgctgaactttggtgtatggccactagtgataccgagagcatcatgcataaccaaaatttgtccgtcagtaacatttccggcgccaataccgataaccggaatggccagctcttcagtgactcggctcgccagttctaccggcacgcattccaacaccaagagctgagcgcccgcctgctcgagcgcaatggcgtctttgagtaattggttggctgcaacttcttcccgaccttgtactttataaccgccaaatatattaaccgactgcggcgtaagccccagatggccgcaaaccggcactgcgcgctccgccagcatgcgaacggtatcgcacagccagcttccaccttccagcttcaccatattggctccggcgcgcattagctcggccgcgtgggtaaaagtttgttccggcgtggcataactcataaagggcatatcggagagcaggaggcagttaggcgcgccgcgacggactgcgcgggtgtggtaagccacatcggcgacggtgactgggagagtggagtcaaagccctgtagcgtcatcccaagagagtcacccaccagcatgacctgaataccttgctcatagaatagttgagcaaagctggcgtcataggcggtgagagtcgcaaacttacgcttttcctgtttccattggcgcaagtgggtcagagtagtcgctttcattattcgttctccagaaaataacccgacagacccgaataacggagcgttatcacacttgcggcctgcaatcagttaacgccagtctaccgctgattagtgcatgtagataaggcagttacattataaatatagtggtctgaatgctagcaaactctcggcaggaatgcacagaagggataaaaggtaggaaggggaacgcgagatagctcgcaacttaatttgcaattaccaagggataaggccgttctttggcaccaatttaaggcgatctaccagggattctccgtcggggaaaatcaagtctggcgcgatgtctgctagcggatacagcataaactcgcgctgtttcagaccgtaatgcggcaccgtcagacgttcggtattaatcactcgatcgccgtacagcataatatccagatccagcgtgcggggtccccagcgctcatctttacgcacacgtccctgattacgttcgatttcctgggtatgatcgagcaattgttctggaggtaacgccgtgtcgagagcgaccacggcgttaagaaaatcaggctgatcctgtggtccaaggggtttagtgcgataaagctgcgaacaggcgaccaaacgggtgcgcggaaggtgttccagcgcctccaaagcggttttaacctgttgcagcggttgtgcaaggttgctgcccaacgcgatataaacccggatcatagacctgttatgccccttctttacgttgggttggcttgcgcggacggcgcgagcgagaacggcgcggcgcagggtcggcacccaaagtattcaacatcgctttttgatgcggcggcgtagcttcctggaattcaccccaccactgagttaaacgctgtagttcatggttgttttccacttctgcacgcagagccagcaaatcgtaggccgcgcggaatttcggatgctccatcagtttgtgcgcccgtttgccctgacggcgagatagacgtaactgcaacagccaaatatcccgtaccagcgcagtaatgcgttttggaatggccagtgaacggcattcttcatccaaaatatcattcatcgccagcgcgaaggcatcgtaataagccagaccgctttcctgcgccagtttttgcgcatgttcgatcaatggataccaaagcatagctgcaaacagaaacgccgggttgacccgcttatcattttgcagacggtcatcggtattttttaatacctgaaccagaattcgctccattggcgaatcattatgctcagtaaaattacgggcaatcagcgggaataacggctggaaaagctgatattcacacagtttaagataagttttgtaaccgtagccggattgcagcagtttgagcgattcttcgaacagacgcgctggcggaatctcacgcagcagcgaagctaagcgcgggatcggctcggcggtttccgggctgatggtcatatccagcttggcggcaaaacgcacggcgcgcagcattcgtaccggatcttcacgatagcgaacttccggatcgccgatcaggcgaataatcccttgcttcagatcgcgcaggccgccggtgtaatcccgcagggcaaaatcggaaattccgtaatacaggctgttgatggtgaagtcacggcgctgtgcatcttcctcgatggatccaaagatgttgtcgcgcagcaacataccgttctgagcttgctgagaagaatttttatcattgccctcaggttgttgctgttcgtgatgaccgcggaaggtggccacttcgataatttccggcccgaacatcacgtgagccaaacggaaacggcggccaaccaaacggcagttacggaacagtttacgaacctgctcgggcgtcgcgctggtggtgatatcaaaatcttttggttttttgccaagcagtaagtcgcggacaccgccgccgaccagataggcttcatagcctgatttattcagacgatagagtaccttcagcgcattatcgctgatttctctgcgggaaatattgtgttgatcccgtgggattaccgtcatttgacgtttttcctcaggctgcaccgcttgtttgacgcggccggtatcagttctagcgggccttttttctttgcgggccactttatcttcaccggtaactttatcttcacggacagttttgtcttcgcggatcagtaccttacggcagaaattggctactcgggtaaaaatggtacacctcgatagtgactaataataaacagaactacggaaaaacagcggctaatcatagctcaccgaggttcctttgagaatgccgttatgttttctggctgagttattgcaccctgatggggaagtaaatccaggctccagtgttcaactgcccagcgtaataataacgatagatcaagatcttgccagctttctgccaccggttgacgcagaaatttcagtgcggcgactaaaattgggcgcggatcgccatcaggtagcggaggcgcgtgattctgcttagatagcttattaccgtcatgattcaacgccaatggcagatgaatataactcggcaccggcgcctgcaactggtgatacagcgcaatctgacgcaccgtaggctcgatcaaatcggctccgcgcacgatttctgtcacgccctgaaacgcatcgtctaccactaccgccagattgtaggcgaacagcccatcacgacggcgaatgataaaatcctcttcagccaacgcgggatcggcatggagcgatcccagcagtcgatcttgaaaaacgtaaaccggatgggtttggcgcagacggatagcggcgttatcgggcggtaaatgcaggttgcggcaatgaccgtcgtagaaaccgccaatttgctgaatgcggcgacgggtacaggtgcagtaatagcttaatccttgttggcgcagccaatcaagggcggcgcggtatgcatcgaggcgttgggattgatagataacctgaccgtcccagtggaggccataatggtctaaagtggtgaggatgcgaccagcagcgcccggaatttcccgaggcggatcaatatcttcaatacgaactaaccaacttccgccttgagcacgggcttgcaggtaacttccgagggccgcaatcagcgagccaaagtgtaaatctccggaaggagagggagcaaagcgccccacatagcgatgattttctgacataaatagagggaggttgctcccgttgtgttatgcggtgccagggaaagcccggcaccgtgttacacgttcttgctgaattagccagccatctgcttttcgcggatttcagccaaagttttacagtcaatgcataaatccgcagttggccgtgcttccaaacggcgaataccgatttctacaccacaagattcgcagaaaccgaaatcgtcatcttctacttttttcagcgttttctcgatcttcttaataagcttgcgctcacgatcgcggttacggagttcaagactgaattcctcttcttgagcagcgcggtcaaccgggtcagggaagttagcagcttcgtcttgcatatgagatacagtacgatctacttcatccctgagctgattgcgccatgcttcaagaatcagcttgaaatgcgaaagctgggcggcattcatatactcttcgcctggcttctcttggtacggctccaccccagcgatggcgagaatgctcaaggacgaggttttacgtttttgcccttcttgcatgatgcttctcctacattcatacgcactatcgaacgattccccaaagtacgggggaaaaatcaggccgctataaataacagatggaaggtaggttggcaattattcctgtcgcctgcttgacaatgctgtgaaggaaggcgtatttggcgagaccctatgcggcaatcggctttttattcagcagttggccactagtgactaaaccgttaataacggtatacgagcagcaagctcaataccgccaggcgatagttgaaaaccgtaacagataacttccaccccagacgcttgagcctgcgccagcaaatcggcataacgcgggtcaatatgtcgggacgctgcaacctgggtaatacccgaatgcaatacggcaaagaacaatactgcccggtgcccatcggcaacctcgttttttagctcccgcagatgcttctgaccccgtagcgtcaccgcgtcggggaaatatccgcactgttgttgcaataaggttacagacttcacttcaatatagcagttggatctattttctgcctgtaataacaagtcgatacggctattttccgcgccgtactttacctcagggtagacagcactgtaaccggataattctggtattgcatccagtgttattgcttcgtagactaactcattggcacgcatagtattaacgcagatccaatccccggtttgggtatgggtgagctcccaggtatggggatatttacgcttaagattgtccgaagtggaataccaaactgtgtcacccggtgttgcacatccggtcatggctccggtattggcgcagtgaatagtgagggtttcaccttcgggcgtcatcacatccgctagaaaacgcttataacgctgaatcagagtggcgtgttgcagcggggtcttaaatcgcatcttgtttcctttttttctcacccaatggccagctttgtatcactttatagcgagtacgcccacggctatagacggattcataaagcgagaactggctcggcgtaaattggccggcgtctactttgggcggcaggttgaccgggcgtgtggcatggcgaaacagcgtgacatgggggtgaaacggcatcgggttttggtagcaaccgctgcgtgccgcctgagatcgcagcaattctgctagctgtagcaatcctctgggggcttgtttacagccgagccataccacgccggaaccgggccagtggccgagatcgtccagagtcacggtaaaggccggctgctcgatacggccagccagttgccgaagcgcctgcgatttctgctcgctcacttctcccagaaaggccagcgtcaaatgcagattggcggcggcgatcgggcggccggtttcttcggggaaatgatcggctcgccactgaataatgtgctgttggcgcgatcgcggcagtgccaaagcgaaaaacaggcggcggctcggattatttgctaaatctgtcattaataaggtttcgcatcgttaaagcctggctaaatacggcgtaagggctagatgctacaatgcctgactgtgaaagttaaccttcgtggagtgtgctgtgtcttctttgcccgtcagtgctgttgttgacgatctattatctgcgttgcaatcttcgccgcaagtcttgcttcatgccccaactggcgcagggaagtccacttggctgccgctgcaaattctgcaacggggcgggttggcaggacgcattatcatgctggaacctcgtcggctggcggcaaaaaacgtagcttatcgtttggcgcagcaactgggggaggaaccggggcaaaccgtgggttatcgcatgcgtgccgaaagtaaaaccggcccgaatacccggctggaagtggttaccgaaggtattttgacccggatgttacaacaggacgctgagttgcaaggcgtgtcgctggtgattctggatgaattccatgagcgtagcctacaggcggatctggcactggcgctgctgttggacgtacagcaagcactgcgggaagatttgaagctgttaattatgtcagcaacgctggataaccaacggctttctgcgttattgcctgatgctccagcgatcgtttctgccgggcgcagtttcctggtagaacgcagctatcagccactatccagccatgagcgattagaggatggcgttgccaaccgggtgaaacgcttactgaaccaagaatctggttctctgctgctgtttttacccggagtgacggaaattcatcgggttatggaacgtttgagcggtgaagtggccgcagataccgatctttgtccgttgtacggcgcactgccgctgggcgagcagcaaaaggccattcagccagcggctacgggtcgccgcaaagtggtgttagccaccaatattgctgagaccagtttaaccatcgaaggcattcggctggtggtggatagcgggttggagcgggttgcgcgttttgatcctaaaaatggtctaacgagattattaactcatcgtattagtcaggcgtcaatgattcagcgggctgggcgagccggtcgattagaatccgggatttgctggcatctgtttgccaaagagcaggcggagcgagcgccggaatacgccgagccggaagtgctcagcagcgacttatgcagtttctggctggaactgctgcattgggggtgtcaggacgtttcccagctaaactggctggattgtccgcccgcgtctgctttatcggcggcacaggatctactgcggcgtttgggagccattgatgacaacggccagttgacgatgatggggcgatctatggcggcgttgggctgtgagccgcgtttagcggcgatgctgtgtgcggcggcgaagcatggcgaggacgcactggcgacagccgcgctgctggcagcaattattgaagaacccccacgcggcggccagatcgatttacatgattggctcagtcgccctcaggctcattggcagcgacgcgccagacaattacagcaacgtttgccgcagcgggcaggcagcgtcaatagcgatttggccggttggctattggcactggcctatccggaccgtattgcgcagcagcgtggccaggatgggcgttatctgctggctaacggtatgggcgcggcaatggcgcaggatgaagctttgtcgcgtgctccgtggctggtggcgatgagtttgttacaaaatgccagcgggccggacgcacgcatcttgctggcgctgccggttgatatcgatcaattggttaaacagtctccccactgcgtgacggaacaaacggcggtggaatgggatgaagaaaaagggactttgcgcgcctggcgccgctggcagattggccgcttaactctaaaagcccagccgttgagcaaacccagcgatgaggcgctacagcaggcattgctgaactgggtgcgtgagcaagggctaaatgtattgaattgggatgagaatgcccgccagcttcgcactcgcctacattgtgccgcgcgctggctgccggaggccgaatggcctgcggtggacgatcagagtttgctggacaatctggcgctgtggctacaaccctctctacagggtgttcgcgatttgcgcggtctgcggcaggttaatattgctgaagctttaacccgtttattaagctggcaacaacgtcagcggctggatagtgcgctgccaagtcattacactgtgcccacgggtagccgcctatctattcgttattatgatgataaaccgccgatattagcggtgcggctacaggaagtttttggtgaacaaagcagcccgcgccttgcagaagggcgggttgccgtggtgctggagctgttatctcccgctcaccgccctttacagattaccggtgatttggccgcgttctggcagggagcctatcgggaagtacaaaaagagatgaaagggcgttatcccaagcatgtctggccggacgatccggcgaataccttaccgacccggcgcaccaagaagtatcagcgctgattatttcagatgtttcctcttcccccgctctgaggtggaggggacattaagcggctatgccggccaatacgcgtggaagtagtggagaaaatgcatgtcagatgaccgcgagcctacggggcgcaaaggtaaaaaacctgcggccaaatccgcgttgaaacggcccttgggtcgccgacgtaatgaagatgattatgaagaagactatctggatgatgatgatcgcgacgatgatgactatgacgacgaggataaacccgtgccaagaaaggtaaaatcccgtcctgcgcgcaaaaagcgccgttggctcggcctattgatcaaactgtttatcgtggcggtggtattgctggcggtttacggcgtatatcttaactcgcaaatccgcagccgtattgatggcaaagtttggcaactgccagcagcggtttatggccgcatggttaaccttgagccgggcatggcttacagcaaaaaagaaatggttaatttgctggaaggaatgcaataccgtcaggtgagccgcatgacccgaccgggcgagtttacggtgcaaaacgacagtattgaaatgctgcgtcgaccgtttgatttcccggatggtaaagaagggcagatccgcgctcgtctagtattcaaaaacgatcgtctggcgcagattgtcaatctggataatcagcgagatttcggtttcttccgtctcgatcctaaattgatcactatgctgcaatcgccaaacggcgagcagcgcctgtttgtaccacgcgctggtttcccggatctgctggtagataccttgctggcaacggaagatcgtcatttctacgagcacgacggtatcagcccttattccatcgggcgtgcggtagtggctaacctgaccgcggggaaagcggtacagggcggtagtaccttgactcagcagttggtaaaaaacctgttcctgaccaacgagcgatctttgctgcgtaaagccaacgaagcctacatggcgctgttggtggactatcgctatagcaaagatcgtattctggagctgtatctgaacgaagtgtatctcggtcagagcggcagcgatcagattcgcggtttcccgctggctagcctgtattactttggtcgtccggtggacgaactgagtctggatcaacaggccatgctggtagggatggtgaaaggggcgtcgctgtacaacccgtggcgtaacccgaaactggcgctggaacgacgcaatctggtgctgaaactgctgcaaaatcaggggatcatcgatgttgagctgtataacatgctcagcgcccgtcctctgggcgtacagccgaaaggcggcgtcattacgccacagcctgcctttatgcagatggttcgtcaggagctacaggaaaaactcggcgacaaggtaaacgatctgtccggcgtgaagatctttactactctcgatccggtatcacaggacgccgctgagaaatccgtggaagacggcgttccggcgctgaaagcggcacgcaatatcaaagatctggaagcggcggtagtggtggtcgatcgctttaccggcgaaatccgggcaatggtcggcggcgcgcagccacagtttgccggtttcaaccgggctatgcaggcgcggcgtttgattggttctctggcgaaaccggcgacttacctcaccgccctgagtcagccggacaaatatcgcttgaatacttggctggcggatcaaccggtgtctatcaaattgccgaacggcaccagctggcagccgaagaactatgatcgccagttccgtgggcaagtgatgctaatggatgctttggtaaactcgctgaacgtaccgacggtgaatctggggatggcggttggtttggatcaaatcagcgccacgctacaacgcttgggcattcctaaatcggtcattaacccagttccggctatgctgctcggggctatcgatctgacgccaatagaagtggcgcaggagtatcagactattgccagcggcggtaaccgagccatgttgtcggcggtgcgctcggtgattgcggaagacggtaccgtgctgtatcagagcttcccgcaggcggagcgtatggttccggcacaggcggcttacctgacgttgtacaccatgcagcaaggggtacagcgcgggacttctcgatctctgtcagccaagtttgggaaatacaatctggcggcgaaaaccggtactaccaacgatttgcgcgatagctggtttgccggtatcgatggcaaagaggtagccattgtttgggttgggcgcgataacaatggtcccgccaagctgaccggggcgaacggggcgttaacgctgtatcgtcgctatctggaaaaccaaactccgctgccgttgatgctacaaccgccggaagggattagtcagatgagtattgattctgccggcaactttatttgtgacggtggcagctggcgcaccataccagtgtggaccgaaaacccgcagggcttgtgtcaggcagcggctgaaccgcagccacagaccgaaggtgacggcgtagccggttggatcaaagatatgttcgggcagtaacttcccgctaaactggcgcggcttcggtcgcgccaatcctttcctgattttccctcgtattatccctgacgtccgctcttttgatctggctcagagttatcccgccgctatccgtggatgatgctggcccctctgagagtgctcagcggtggcaggcaatgctgtttttccgttaatatcatcgctgattatcgtccgcccgcagatcttgcagtgggttggttattacgcataaactgattgctttgataattattatcgtttttattcattttctcatcgtgccgttataacagggcgctatgctaggtaatatgcaggatagacaggctaggcaatccagtaacttcactcttcgggaactgagtttttccgttcccggccgaacgctattacagccgttgtcgctgagttttccgcagggaaaagtatgcggattgattggccataacggttcgggcaaatccaccttgctaaaaatgctgggtcgccaccagttgccatccgccggtgaagtgctgctaaacgatattccgttgagtcagtgggataacaaagatttcgctcgcgaagtggcctatctgccgcagcaattgcccgctgcagaagggatgacggtgcgtgagctggtcgctattggccgctatccgtggcatggagcattggggcgttttcggccagaagatcgccaacaggtggaggacgctatcgcgctggtggatctcaagcctttggctaatcgattggtggacagcttatccggcggcgaacgtcagcgcgcctggttggcgatgatggtcgcgcaaaacagtcgctgtcttttgctggatgaacccacttccgcgctggatattgctcatcaggttgaagtactgagtttgatccaaggtttgagccacgagcgcggtctgacggtgattgcagtactgcatgatattaatatggccgctcgttactgtgattatctggtggcgctacgcggcggtgaaatgatcgcgcaaggagaatctgaatccctgatgcagggctcagtcttggagcaaatttacggcatcccgatgggaattctgccacatccagccggcggtgcgccggtaagttttgtctattaatgaatcgattttcctctgctgtacccgatagagaacgtcgccgtttgctgatagccctggcggtttcgccattgctttttgccctgccgggccgagctgcatcttatcctgatagcgacaagatcgtagcgttggagtggctgcccaccgagctgctaatggctcttggcgctacgccgctgggcgtggctgatattcataattatcgccaatgggtggaagaacctaagctacccgccagcgtgattgacgtgggtcagcgtaccgaaccgaatctggagttgttgcagcaactggctccctcactgattttactctctgaaggctatggccctacgccgcagaaactggcacctatcgcaccgagtatgagttttgcttttaacacgccgggtggctcgccgtttgcatcgggcagaaaatccgtgcgtgccttggggcaacgtttaggaatggagaaagcggcagagcgtcatctggccgaacttgacgcttttatcctcgccgcccgtgggcgattgcagggctataactcaggttcgttactgatgttttctttgctggatagccgccatgcgctggtgatagggcaaaatagcctgtttcaaggggttcttgacgagctcaacatcaaaaatgcctggcagggggaaaccaatctgtggggcagcaccatcgttggtatcgagcgtttggcacagattaatccggggaaagctatctgttttaaccacagtaacgaccagttgctaaaacaggtttccagtacgccgctatggcaatcaatgtcctttgtgcgccagcaacggttgcgggtactgccgccggtatggttctacggcgcaaccttatcggcgatgcgttttgttcgtttactggaacaagcgttggagcaaccttcatgagtgccgctttcctgcgttctcaacggttaatacctatagggctgatttctctgctgttggctttcggtgcggcgttaacgttgtataacctcaatcaattgctcccgtttaccgactggtctcaggcgctatggtcgcccaatatcgacgatgtgcgacaaatgctgttttattacagccagttgcctcgggtggctgtagcgttactggccggtgccggtttaggtctggtgggggtattgttccaacaagtattacgcaacccgttagctgaacctgccactttgggggtgtctgccggtgctcagttagggttgacggtggcaacgctatggatgctgcccggcggtgatttcacgcgtcaactggcggcgatggccggtggtgtgatcgtcggcttactggtatttggcgtggcttggggcaaacgaatgtccccgataacgctgattctagccggtttggttctggggctgtattgcagcgcgttgagtaacttactggcgttgtttaattacgatcaactacagggacttttcctgtggagcagtgggacgctgaatcagcaggattggagcgcggtgcagtttattctgcctcgcctgttacttgccgggctgttggcggctctgctgatacgtccgctgactttactggggctggatgatggcgtggctcgtaatctggggctaggcctgtcgctggctcgccttggtgcgttggggctggcgatcattttcagcgcgatgctggtcaatgccgtgggggttatcggttttattggcctgtttgctccgttgctggcgaaaatgctcggcgcgcggcgcttgtcgcagcggctgctgttggctcctttcatcggtgcgttattactgtgggtgaccgaccagattatggtttggctcacaccggtgtggcgtgaaattcccaccggtgccgcgacggcgttaatcggcgcgccgctgttgctatggctgttgccacgtttacacagtgtcacgccgccggcgatgaatattggcgataaagtgccggaagagcgccaaggtttactgagatgggctagcgccggcttattactgttactggcgggattggcggtggctctgctgtttggccgcgacggtcatggttggcagtggattggcggcgatcatctttcggcgctgttgcaatggcgctggccgcgggttctggctgctctggctgccggaatgatgctggcggtagccggtgcgttgatacaaaaactgaccggcaacccaatggctagcccggaagtgttaggtattagctctggcgcggcttttggcgtggtaattatgctctttattgtgccgggcaatgccttggtatggttgttacccgcaggtagtttgggtgcggcggtgaccttattcctgatttcgtttgtcgccgggcgcggcggtttttctcccggcagaatgctgctggcggggatcgcggtcagtactgcgtttaccacggtaatcaccatgctgctggccagtggcgatccgcgaatgcgtggtgtgctggcgtggatttccggctctacttataacgtcaccggttcacaggcattatctaccgccattatcgcgctggtgctgatggctttggctccgctatgccgtcgctggctgatgattttgccactgggcggtgtaacggcgcgagcggtaggaatggcactggctcctagccgcctggcgatattgctgctggccgccagcctgaccgccgccgccaccttaaccgtgggtccgttgagcttcgtcggcctgatggcgccgcatatggcgcggatgctgggcttccgtcgtgctattccacagttaatcattgcggccatcatcggcggcctgctgatggtgtttgccgattggttcgggcgtatgctgctgtttccttaccagattccggcgggtctgctggcaacctttattggcgcgccttacttcgtctatttgttacgtaaacagagcaattaagccttttatcaggcgcagagaagactcgtgctctgcgccaagtcctgccattttataggggtattataccctcaggaaattattctaacctgacgtaaattcaccgttgaaaactcggctaactcaccgtatttattcgtgattttctgtcgcgatcgcattttgaaaagcctgttaataatttatttgtgaatggaaattatttgtattagtgtttacgcgtttttacactccgtcataacttccttcgcggtacgctaatgaaaaataatcgtcagaagttgttcacagaaactgttgttatcgccacggcactgctgagtggcagtgcttatgccgccgctgagactaacgccgatactatggtgatctccgccagtcgcactaataaaaccgtggcgaatattgcccagaccacctggattatcgataaccagcagatctccgagcaggccggcggcggaaaagatatcaaagaaattctggcgcaattggtaccgggtatggacgtcagcagtcaagggcgtactaacttcggcatgaatatgcgtggccgcgaaatgatggtgctcatcgacggagtgaggatgaatacctcccgtgccggtagtcgtcagttggattctatcgatcccttcaatatagaacgcgtagaagtgctttccggcgccagcgcgctgtacggcggcggcagtattggcggtttggtcaatatcattaccaaaaaaggtaagccgggttccgagtttgaattcgcaaccggcgctaaaagcggtttcaataatagcgatgatatggataacaactttggcgcggcgtggagcggcggcaatgaacatattgacggacgcctttctgcttcttatcgtcggtttggcggcgggtacgatggcaaaggcgatcctatcaccatggacatcacccagaccggtttacagtattccgaccgtctggatctgatggccaatggcggtattaatctggatactaatcgccgtatcgaagtgctggcgcagtattacaaaagcgccggtgatggcgatcacgcgctgtatttagggaaggatttctccgttgtgaccggcaaaggcggaaacgcagaaaaccgcagcggtatgtattcggaccgcattcccggcacgcagcgtaacttgctgaatttcacttataccgataaagatttcttcggtcaggaattgttggctcaaacttattatcgtaacgaaaagctggatttccatcccttcccgcggctgagcgccaataaaacccaagtcgatagttattccacttcgcagcaaaatacccgtcaatacggtgcaacggtagccatgaccagtcaattgaccgacaggtggaatctgacttacggcgcggatattgatcgggaggagtttgatgctaatcagatgagcttcgatatggcgaaagccaatgccagtggcggcatgaatatgagcagcatttatcagattggccgctatccgggctacagcgtgactaatagcgcactgtttatgcaaacggactatgcgttaacggaaatgttcacgctgaacggcggtgtgcgctatcaatatgcgaaaaacaccatcaacgactttgtgggaaccactcagcaggaagccgttgcctctggtcaggctaaaagcgccgatgctattcccggcggcacaaccagctacgataatctgttattcaacgctggcgtattggcacatttgactgaaaatcagcaaatgtggctgaacttctctcaggcgttccaattgccagacatcggtaaatattacggtcagggcaactacgtcaaagtgggcgaccactatcagctaaaagacagcattaacgtagcggattctcgcctgcaagggattaaaaccaactcctatgagttaggctggcgctacctgggcgataacgtcacgacccaattggcggcctattacacgcagtcggataaatcgattaactacaataaatccacgttaaatattgatgtggtggatagcaaacgtcgtatttacgggattgaagggcaagttgattacagtctgccaatgccagaatggactaccggtgcctctttcaacctgattcgctctgaaaaccagacaaaaacgggctggagcaaagtgactatcactgaagccagcccgtcaaaactgaccgcttatgtaggctggacgccgggagactggaatttgcgagtacaaactcagcaggcgttcgacgtgaccgacggcgcgggaatgaaactggatggctacaatactgtggatatgttgggttcttacagtctgccggtgggcaaggtttctttctctatcgaaaatctgctggatacggaatacaccacgatttggggccaacgggcgcaggtcttctacagcccgctttatgggccggcctcgctgtatgatttcaaagggcgcggacgaacctttaatctcggttattctgtgactttctgatagcccgcagggaataaaaaaacccgcttaaaaggcgggtttttttacgtttaacgtcaggtgaacattacagcttggcgaaacagcggcgagcggcatccacggttttctgaatgtcttctgcgctgtgcgctacggacataaagccagcctcaaaggcggacggcgccagataaaccccttcttccagcatcagatggaagaagcgtttgaaacgttccacgtcgcaagccatgacgtcctgatagcaagtcactgatttagcgtcggtaaagaaaaagccgaacatgccgccaacgtggttaaccaccagcgggatattctcctcttttgccgcatgcagcaggcccgcggccagagtgtcggtcagctcggtcagagtttcatgtacgccaacctgcgatacttccgtcagacaggcataaccggcggccatggcaatcgggttaccggacaaagtccccgcctgataaaccgggccggtcggcgccagcgcttccatgatttcctgacggccaccaaaggcacccaccggcataccgccaccaatgattttacccagacaggtcagatccggctctacattgtaatagctttgcgcacctgccaatgccacgcggaaaccggtcatgacttcatcgataatcagcagtgcgccgaactcgtcacacagcgcgcgcaggcctggcatgaattctggcagcggcggtacgcagttcatattgccggcaaccggctcgacgatgatgcaggcaatgtcctgcggatattgttcgaaagcggcgcgaacggaggccaaatcgttgtaagtacaggtcagggtgtgcttggcgaaatcagccggaacgcccggagagttaggctgcccaagggtcagagcgccggaaccggctttaaccagaaggcaatcggcgtgaccgtgataacacccttcaaacttgatgattttgtcgcgatgagtatagccgcgcgccagacggatggcactcatggtagcctcagtaccggagttaaccatccgcaccatatccatggttggcaccagattggtgaccaactcagccattttcacttccatctctgttggagcgccgaagctcaggccgcgctcaactgcttcaatcaccgcattgcgcaccgccggatgattatggccgagcaccattggcccccaagaaccaacataatcgatataggctttgccatcgacgtcgaaaaggtaagcgccatcagcccgatggataaagagtggtacgccaccgacaccggtaaatgcacgcaccggagagttaaccccaccggggatcaactgttgcgcttgggcatacaaactttcggacttattcattaactggctcctgaattgggcttggcaaggaattaatccgttcattctaaagtactgacggcggttatcaaataattgggcatctttcgtgtaggaatgcgggctataaactgctttctcattaaggaagagagatcgccaattagcggcatcctgcgccagatcatgcgtcttcggattttatgcaggcgaatagatcggttgtgcgctaaaatctgcacaccgtctatttgtattacttattggttcaactgataaataacttcactatgactgattcaatgcaacaaacacctaacgttggcgccttacggattagacgtggccatttcattcgaaccctgattaatcgcgataaaacgccgattgttattttggtcatggcgggcgtggttggtgtcattaccggtttgctcggcgtcgctttcgatcgtggcgtcgattgggtccaacagcaacgctttgcggcgatagggcaggttgcagattacgccattttggtgtggccgctggctttcatcctatctgcagtgttggcaatggtcggttactttttggttcgccgctttgccccagaagccggtggctctggcattcctgaaatcgaaggcgcgctggaggaaatgcgcccggttcgctggtggcgggtgattccggtaaaatttatcggtggtctgggtactttgggcgctggcatggtgctggggcgtgaagggccaatggtgcagatggggggcaacaccgggcgaatggtggtggatattttccgactccgtagcccggaagcgagacattctttattggcaaccggcgccgcagccgggttatccgccgcgtttaatgcaccgctggcggggattctgtttgttatcgaagagatgcgctctcagttccgctacagcctggtttcgattaaggcggtatttgtcggcgtgattatgtcgaccattgtttaccgctattttaacggtgaaaaggcgctgatagacgttggccgtctcggcgatgcgccgttgaataccctttggctgtatctgacactgggggttttgtttggtgcggtgggtgtagcgttcaatgctttggtattccgtactcaggatatgtttatgcgtttccacggcggagactggcgtaaactgctgatgattggcgggctactgggcggtatgtgcgggctgctgggggtcattcaagctgaaaccgtcggcggcggcttctcgctaattcctatcgcggcagcgggaaattacaccatcggtatgctgctgtttatctttatcgctcgaacgatcaccactttgttgtgtttcggctctggtgcgccgggcggcattttcgcaccgatgctagcattgggcaccatgttaggtaccgcctttggtctatcttgcggccactttttcccagaatataatattgaagcagggacttttgctatcgctggaatgggggcattatttgccgcatccgtccgtgcgcccctgaccggcatcgttttggtgttggaaatgaccgataactaccaacttattttaccgatgatagtgacctgtctgggggcgacgctaattgcccaatttatgggcggtaagccattgtattctgccattttagcccgtaccttacagcgtcaggaacaggcggcagaagcggcaaaagccagtgaaacggcggttgaaacaggtaaataaaatatatcatttaccgtgaatacttgaacccattactcaggtattagataattgccacatagatcaggctgccattgtagtgacctgcaactcgaacaccggttgggagtacagagtatgagcgacgaaacagtattgcccctgcagtttaccgaggcagcggcaaaaaaagtaaaactgctgatttcagatgaagaaaatccgaatatgaaactgcgggtctacattaccggcggtggttgtagcggattccagtacggttttacgttcgacgaccagatcaatgacggcgatatgaccattgaaaaagaaggggttgagctggtggttgacccaatgagcctgcaatatctggtggggggcgcggtggattacaccgaaggtctggaaggctcacgttttatcgtgactaacccgaatgccaaatcaacctgcggctgcggttcttcctttagtatctgatagttatcgcatcgatttattaatagcgaaaaaaaccgcctgcctttcggtaagcggtttttttatgtccgacgttcatcactttcgattagcgctctctcgatcaccactctaacgtaatcaattgaacaggaatctgcacatcgtttgtgacctcagcattccgcagtgttacagcgtcagaacgcgtaattttgggggcataactggcgtcttttgggcaattgacctgcgggtttggcccgtcaggggtatgattggtctctggtgaaatctggcatgctgcgtacagcttcaggctgacaaagatactgccattctgactttttgccagtccgggcatagcgaatagcgctagccaggaagtaaaaaaaagtcgtttcataaaaaatttatagttcgttggccatcttttcgttcagacggaaagcacattgagtatcaggtatcggtctgctgcgaagaaacttggtggctgaaatctgaatataacttaatcagtgctatgggtcgtgataataaaagcaggttaggcaaaatcgtcgtaatgaaaaagtaatatgtcatcacagtatatgtttaattatcatggtgtaaaaacctgaaaaaacaaagtgataaattaacctaaaacgctacgcggaatactattttttatgacatgcctgcatttatcagccaaagattatagcgcaatcgtaatattaaagccctatataaataagcgttgtaatgtaactttatctcaagtgataggaggatattatgaacatagctttaactattggtacacgttcggttttagttagtgaaagtcgccttgaacgaatgatttcacaagataaagaccatgcaacgcagctgggattatgggataaaatcatggattatttccgcccagaaaaaaaacaggatgcaatgaatgaactttacaggttaacccatgctcatggcacatctgccagcataactctacgagatagggtagagatttttaataaaataaaattgatgtctgagccagtatatagagatttatttagagtagaggaccacccgaataaagataatattactttttttattggcgagcaggatatatatagtcaagaccgtcactctctactactagaagagcaacagtttctttcatattttaatatgaataaaatcaataccgaccaggatttgaaaatagatttcattgcagcaataaaaagatatatttctggtgatttaagagtgcagtggaataatggtggagctaaacagatttttaaagatatatgcagaggaacatataatgtagacgggtttagaatgtccgttactgataccattagctcagaagtaaaagaagctcatctgaaaaaatttattaataaattaacggaaaaacaggaagaggttttcaatatcgtgggatcgcaaattgggcaaattgcgctgattgataccttattatcctctaaaaaacagtttttttttcttgggaatccggacaagcaagctgagtttcgctttgatgcagagagtggtgagattgaagtcagccatcttattcagcagaatgtaagtcatgaacattttatggtgttacgtgaacattactttcaagaaaacgcgcattggtatgatggacttagtcttaaagccacttttactattgcgggggatggatctgtcgattgcactaacttccatttttacagtaaagaatatgatggaaacactgatagtcatcgttctgagtaatcggtcgaatatgcgtttaaaagccactgtatttatgtgagttgatatggtcaaagtgggaagagtattttctgccctttatgagccggggcaggggtagatattcggaactttaagaccgttactgcaaatggaagtcgtccagcatcaacgggagttttcgcgtgttctcgttaatgctgggctgaatggatattaatctattcaatctcaaaggtgggcaacttcaagcgccagcgaatggcagccagccggatagccagcgtgatcgccatacccagcatcatagcctgttgcagcggcataccaaaagtatggtaggccgtggcatgcgcaatgccgccaataatacaggcggtggcgtagatttcggtgcgtagaatcatcggtatttcccgcgccaatacatcgcgaatgattcctccgcccacgccggtaatcacgcccatacaaatcgccaccagcggactggctccggcggcaaaggctttattcacgccgatgcccacaaacaccgccaatccaatggcatccagcactggtagaatccactttggcgtccggcgcggttggcgaaccagcaaaatagtcgccagacaggtgatcatcgctaccaccaggtcggtgggatcttttacccaaaaaaccgggccattagccagcgccatatcgcgaatggttccgcctccgacagcggtcaccacgcccaagaccaatacgccaaaagggtccatccgtagcttgcccgccaagagtacgccggatatggcaaataccgccgtacctaaaatatccagccagtagaccagcatttgagattactccgcgacaggggatgaaatgctggccagttgctggcacagctgttgagcggcgagcaggatacgcgggctggcgcgattaaaccagtcttcattgacggcaataaccgggatatcgagctgcggctgccagaaggcgcgaaccgacttgatttgctcatcgccaccggcgataacgatagcctttggctggcggttaagtacctgttcacggctgatttgcggccagggtacgcggctatcggcaaaaatattttcgccgccgcacaacgcgacgacttcactttgtaaggtatggccggacgtggtgaacagcggctgggtgccaaattgcagcaataccttcagaggctgattttttccataatgttttgccagctctgctctgcgtagccgaatttgctgcgctgcctgatgggctttttgcggttcagggctgtatcccgccagtttatccagatcgtcggcgatctgctcaatagtggtgggatcggaataaaaaatgggaatcccgaatgatgccaactggtcgagcggacgttgggcattaccgccgcgccaggccagaatcagatctggcttaagcgccagtattttttcaacattaatcccttgccaggaagccacgtgctccaactttttggccgcttcaggatagtcggagtaatcgctgacggcgaccagcttatctcccaaaccggcggcgtaggccagttcggttgtgctaggagccagactgatgatccgttcggctcccaaggcgggtatcgtcattcccaggatcaaaaagccgcagaatatggctctgcggcagaatgtcggtattgagcctgatttcatacttacgcgcgctgggacagcattttgagcatagcttcaatcatcagcgtcgattgctgagcggctaccaccaagaactcatcgaagctcagatgagattctttatcggcaacgtcagaaatcgcgcgcaccactacaaatgggatattgaaggcgtgacaaacgtggccgatagcggcggcttccatttctacggcagctacgctcgggaaggttttacggatacgagccaaaggctctgcgccattgataaaggcatcgccgctgcaaatcagaccgcgtacagcattaagattcaattgcctgatgcaggtttcagccagttcgattagggcgttatctgcggtaaaggccgcggggcaaccggccatttggccagcttcatagccaaaggcggtgacgtccgcgtcgtggtaacgcacttcttcggaaaccacaatgtcacccacgttcagcgaggccgccagaccgccagcagagccggtattaatgatgacgtcaggctggcaatgttccagcaataatgtggtgcccattgccgcagagactttaccgatgccggatttcagcagggcaacctctactccatacaactggccggtgtagatctcacagcctgcgcgtgacaatgtctggcggttttcgatcttgtcgcgtagcagagtaacctcttgttccatcgcgccaataattcctactttcattttgaatactcgctaatttttaaaaggggataaccatgtttttctctgtcagtaggttatcattgtagtgagctacaggtaatgtgcaatggcgttgcgtcgcaggtgaatgaagggtgctaccgaaggtgcaaccgtcagggggaatgatgtccgggatcgactttaagcagaaaatcagttttcagcgtccgtttagtcaaacgattaccgctgaagatgaatatgacattgtgcgccagtttgagagcgatcgcgggcgcatcgtcaattcggcagctattcggcgtttacagcaaaagacccaggtttttccgttagaacgtaatgcggcggttcgcagtcgcttaacccactcgctagaggttcagcaggttgggcggcacattgctaaagaaatactgaatcgctttaaacaagataaacggatcgacgaattaggtctggataagctactcgatccttttgaaagtattgtagaaatggcctgcctgatgcatgacatcggcaacccaccctttggacattttggcgaatctgcaatcaataattggttttcccgccgtatggatcccgctagctgcggatcagagccgcaaacgcaggatcgctgcgaggttagttttctgcgattgtcagaaggacagcaggaattgaaccggctgcgcagccgtattcgacaggatctcagccattttgaaggtaatgcccaagctatacgtttggtttataccttgctgaagctcaatctgacttacgcgcaggttggctgtattttgaaatatacccgcccggcctattggtctgcgcccttgcctcccagccacagctatttgatgaaaaagcccggtttctatctggcggaagaagactatgttgagcggctgaggcgagaattgaatatgggagaattcgatcgcttcccgctgacttatattatggaagctgccgatgatatttcttactgtattgccgatctggaagatgcggtagaaaagagcatctttaccgtggagcagctatttgaacatttgaagaacgaatggggtgaggtcgtacccggtgatttgtttgataaaataattgggaatgcggctcgtaagattgaacgagttcaagggcgaagaagttcagaagatcaattctttatgtatttacgggtatataccgtcggtaaattggttcctcacgccgctcaacgatttattgataacttatctagcgtatttaatggaacctttaatcaggcgttattagaggattcaagtccagcctgcaaattattacagattttcaaatctgtagcggcaaaacatgtatttaatcatccggaagttgagcaactggagctacaaggctaccgggttatcagtggtttactggatatctacagcccgttactctctatgccgcaggcggctttcgcgcagttggtcgcggaggacagtcatcgcgactatccaattgaaacccgcctgtaccataaactttcgatcaagcaccgtttagcctatgttgaggcgatagaaggtgtgagtcatttatccgccgagctgcgagagattagggaatattattatcgggctagattgcttcaggattacatcagcggtatgaccgatctttatgcctatgatgaatatcgtcgtttgatggcggcagaataagtttctgctgccgttctattatttaatctttattaggtcgagttttgtaaagacggtaaacaatttttactattacagattcagtattaatgaacttaggctctgacgactactcttactttgcatgactcgattagttagtcaaaactattaattaacttgttatttgtatatagagagaaagagaaccgacccatgaaaaaaactacgttagtgttaagcgcattggcattaagcattggtttcgccatggggccggtctctgccattgctgcagaaaccgcctcatccagcacccagcagctccctagtctggcaccgatgctagaaaaggtcatgccatcggtggtcagcatcaacgtggaaggcagtgctacggtaaaaagtgccgggatgccagaccagttccaacagttcttcggcggaaactcgccgttatgtcaggatggttcgcctttccagggttcaccgctgtgtcagggcgggctgggcggtggcgatggtcagccaactcagaaagaattccgaggattaggcgctggcgtagtgattgatgctgcgaaaggctatgtggtgaccaataaccacgtagtagaaaacgcgaataaaattcaggtgcagttgagcgatgggcgtaaattcgacgccaaagtgatcggtaaagatccacgcaccgatattgccttgatccagttgaaagactttaaaaatctaacggcgatcaaaatggccgattccgatcaactgcgggtgggcgactataccgtggcgatcggtaacccttatggattaggggaaacggcgacgtccggtatcgtttcggcgttagggcgcagtggcctgaacgttgaaaactacgaaaactttatccagaccgatgctgcaattaatcgtggtaactccggcggcgctctggtgaacctgaatggtgaactgatcgggattaacactgctattctggctccggacggtggcaatatcggtattggttttgctatcccaagtaatatggtgaaaaacctgacgtcgcaaatggtggagtttggccaggtgaaacgcggcgaactggggattatgggaaccgaactgaactccgaattggctaaagccatgaacgtggacgcgcagaaaggtgcctttatcagtcaggtattgccgaagtcttcagcggcaaaagccggtattaaagccggtgatgtgattgtgaccatgaacggaaaagccatctccagcttcgccgccttccgcgctgagattggcacactgccggtggggagcaaaatagtgctgggcctgctgcgggaaggtaaaccgattactgtcgatgtcacgttggagcagggttctcaggcgcagatcgcgtctggcaacatttacacagggattgaaggcgctgaactgagcaactttgatgccgcaggtaagaaaggcgtgaaggtagatagcgtgaaagaaggttctgccgccgcgcgtatcggcctgaaaaaaggcgatattattaccggtgtaaaccagaaaccgacgctaaatctcggtgagttacgtaaaattctcgaggctaagccttcagtgctggctttgagtattcatcgtggtgataccgatatttatctgttagcacagtaattatccgcgattcggggccagaatatttcggccccgaattttacctatccccgcttaattttcctttgattcaggcgacggcggttggcctatatggcttttcgcagcctgaatgacattctctatttcatcgagtaattccagccattctggcaataaatcctgattgtcagccttctgccgtagctgttgctcaatataggaacacagccgttttagtctcgggacgccgctgcacgcgcagctaccgtgcaatttatgaatcagattcacgatatcctcgtcgtctgcgccttccacaatggcgttgacccgctgtgtgacctgtgggagaaacgctaatagcatgaccaacagctcctgcgccaaatcttctttattggcggcctgacgaatagctagcggccagttaatcgaatcttcccagcctgcaggccgcggggtcattaccgtagcagacttctgaacggtcgtttgttcatgctggtaaaaacgcgccagcgcctgcgtcagccgggtttcatcaataggtttagccagataatcagccataccaagcttgagaaactgctcctgttggccactaatggcgtgggcggtaacggcaattattggcgtattaacatgattaggtaattgatgaattaactcactggcgcgaataccgtccacttccggcatctgaatatccatcaaaatcacgtccagagcatgttcgcgggcgacggcaatggctttttcagcgctttcacacagaatggtttcttcaacctgttcttccagcagtgtgcctatcagttttagattcgcaggattgtcatccaccgccattacacgcagcggcaggcgcggctttttcggttcgttttcgtttggcgcgggcaatgctcgcggatcttctttcaacaacagtggcatcaggcgattgctggaaatcggtttcaccagacaggctttggcacctaactgttttaactgctctgcatcaacctgagactggcttggcaacgccagaatcacatgatcggcaatttttagcgccgctaacagcttatcctgatgacctgccatattcgtgcggaaaggaatcggaacgccgactagcaggaaatcgtagtatttatccgggagttgggccagcgtcgggctgtgagtcacccgcagaggcgtaatgctcaacatatccaacgtggcctgagctgccgccggattccgttcgatataggctaaatgcttgccggcgagctgttccatggttggctggcgatagaccatgccttcgttgagatctaaagtgatatggaaacggaaagttgagccacgatttaactcgctacggaagctaatatcgccgtccatttctttgaccagacgctcggttattaccaagccaagcccggtaccaccgtggcggcgggaaatgctggcatcggcctggcggaaagcttgaaacagctgagactgctgctgttcggaaataccgatgccggtgtcctgaatctccaccgccagcttaatttgtcgggcggtttgcgatagcagacttacgtggatatctacgttaccattttcggtaaacttgatggcattgcccagcaggttggtcatgacctgctgcaagcgcatagagtcgcctaccacctgttctggcacatcattattgacgtgcagcgtcagttccagccctttctcatgtgcggtgtgagccagcaaaataacgacttcatccaaggtttcacgcagcgggaatggaatatgctccaacaccagcttttcggcctctagcttggagaaatccagtacgtcattgatgatacacagcagattattggccgagcgctggatggtttgcaggtaatctgtttgagttggcgtcagggaggttttcagcgtctggcgggtgaatccgattacgccattaagcggcgtgcgtaattcgtgggacatattggccagaaactcggatttaattcgcgccgcttcctgcgcccgtttcttcgccagacccagttccacgttctggatttccatctgttccagcgtttcccgcagatctgaagtggcctgatcgatattctgctgcatttcctcgtggtaggccgccagcgacatcgccatcgagttaatgccgtttttcaggatattcaattctcccagcatgtgtccttctacccgactatccaactggccgcgccgaatccggtctacggtattcaccatattacggatagggccggtcacatcgcgcatcagacgataggcaaacaaaatggcaatacacaggcagaacaacagcaataaagtagagataaacacttctttatattgctgaagtcgtacggattgtaaatctagatcgatggcaatataacccaacggacggttgctaatattggcttctggtggccggtcactggagatattatattccgagacaatgggcattcttaagattaacgaatcccctcggtaggtcagcatcaaagaactggggatcggaatattattcgtcaaccttaattgtgacgagttgtaattatagttagaagtgacaaaaagattattatctgcgtcaaaaacggtaattgaacgcacaatatttgaatggcggcgatgtaacagattaattaactgtctgacggtatctcgattacggaacgtcattccatattcactggcaaccgccagcggttcgataatactggttcctgcgttaactacttggttttgcagttcattatatcgatgcaccataaaagatgtactgagtaatagcccaagcagaagcgtgggagctaagattagtatcatcatgcgcgcgcgaagactgtatttggtcatggtattccaatgtgggagaattagcagcttacgaaaaccaacgcatactcatcaataattatggcgcaattctactctccaaaccgccgtgttacgacccggcaaatgataaccgtgactgctgacgacctggatcctttagggcagggcgttgcacattatcaaggtaaggccatttttgtccccggtatgctacccggagagcaggccgagatacagttaactgaagaaaaacgtcagttttcccgcggaaagcttcagcgtttactgaagccctgcgccgagagagtcgcccccctttgcccacattttgggacctgcggcggctgccagcagcaacatgccgatacccacttacagcagaacagcaaggcggctcacctgcaacgcctaattgcgcgagaaacaggcgtaaccgtagagccagagtctgtcatctgcgggactgaatacggttatcgacggcgagcgcgtttagggttgtactaccaacctaaacagcagcgtttggtcatgggttttcgcaaggtcgcttcccacgatttggtggcgataaaaacctgcccggtactgcgaccagagctcgagcgcctgttagcgccgctttatcgctgtttgtcagaattgcgtgccgttaaacgcctgggacacgtagaattggtgctggccgataatgggccgttgctgacgctacgtcatcttgatagcttgagtaccgccgatcgcgccgcgttactggctttttctcagcgtgagcaggtcgcgatttatctggctcccgacagcgatcatattgagcgtttaagcggcgaggagccttactatcagatagaaggtctacgcttagcgtttaatccgcgcgattttattcaggtcaatgccacggtaaatgagaaaatggtggcgcaggcgctggaatggttggatgtgcaaccgaatgagcgcgttttggatttattctgcggtatgggtaattttactttgccgttagcgcgtcatgccctacaagttgtgggtatagaaggagttgcgacactggtggctaatgggcaatataatgcgcagattaatggtttagctaatgtttcgttctttcatgagaatttagaggacgagatcgataaacagccttgggcgagccaaggttttgataaaatattgctggacccggcgcgggcaggtgcggccggggtcatgttacatatagtgaagctggcgccgaaacgggtggtatacgtgtcttgtaatcccaccaccttggcacgagatagccacgtgctgatcgacgccggttaccgtcttgcacgtgtgcgaatgttagatatgtttccgcacacggggcatcttgagtcaatggcgctgtttatacagcaggagccactggccgctgagtagggagaagttatggttgcggtaagaagtgcacatttgaatccagcgggcgagtttgctctcgacgattggatcgccagcttgggtcttcccaacccgcagtcatgtgagcgattagccgaaacctggcgttattgtgaacaacatacacaaggtcatcccgatgcctcgctactgctgtggcgcggccttgaaatggttgaaatcctttccaccctgagtatggataacgacagtatgcgcgcggcgctgctgttcccattggttgatgccaatgtggttaacgaagaaaccctgaccgaacagtttggcaaaggcattacctatctggtgcacggcgtgcgggatatggatgccattcgccagctaaaggccaccactaatgattcgatgagttcagagcaggtggataatgtccgccgtatgttactggcaatggtggaagatttccgctgtgtggtcattaaactggcggaacgtatcgctcatctacgggaagttaaagacgcaccggaagatgaacgcgtgctggcggccaaggaatgttccaatatctatgcgcctttggctaaccgcttgggtattggccagattaaatgggagctggaagatttctgtttccgttatctgcatcctgatgaatacaaacagatcgccaagttgcttcacgagcgccgcatcgatcgcgaacagtttatcgacgattttgtcgcttctttacgtcaggccatggccgatgaaggaatcaaagcggatatttatggccgccctaaacatatctacagtatctggcgcaaaatgcagaagaagtcgctggcgttcgatgagctgtttgacgttcgcgcggtgcgggtggtggttgagcgtttgcaggattgctatgccgcattaggtattgtgcatactcatttccgtcatttgccagatgaattcgacgactacgtagccaaccctaagcctaatggttatcagtcgatccacaccgtggtgcttggcccgcgtggaaaaacgctggagattcagattcgaacccgccagatgcatgaagatgcggaactgggtgtcgccgctcactggaaatacaaagaaggggcggttgcggcagggcgctcaggctacgaagggcgtattgcctggctgcgcaaactgatcgcgtggcaggaagaaatggccgattctggcgagatgttggatgaagttcgtagccaagtgttcgacgatcgggtgtatgtgtttacgccaaaaggcgatgtaattgatttgccagccggctctacgccgctggattttgcctatcatatccacagcgacgtgggtcaccgttgtatcggagccaagatcggcgggcgcattgtgccctttacctatcagctgcaaatgggcgatcagatcgaaattatcacccagaagcagccgaatccaagccgtgactggttgaacccgaacctcggttatgtcaccaccagccgcggtcgttccaaaattcataactggttccggaaacaggatcgcgataaaaatatcctggctggccgtcagatgctggacgacgaactggaacatatggatatcagcctgaaagaggccgaaaagctgctggttccacgctataacatgaattcgctggatgaagtgttagcggccattggtggcggtgatattcgtctcaatcagatggtgaacttcctgcaagggaagcttaacaaacctacggcggaagaagccgatctggaggcgttacgccatctgaccaacaaaacccagcagccgtcccgcaatagcagtaaagacagcggtcgcatcgtggtggaaggcgtcggtaatctgatgcatcacatcgcacgttgctgtcagccgattccgggtgatgaaatcgttggttttattactcaaggacgggggatttccattcaccgcgccgattgtgaacaactgctggatctgcaatctcacgcgccggaacgcattgttgatgcggtgtggggagaaagctattccagcgggtattcgctggtggttcgggtcacagccaacgatcgcagcggcttattacgggacatcaccacgattttggctaacgaaaaagtcaacgtattgggcgtcgccagccgtagtgataccaaaaagatgctggctaccatcgatatggatattgaaatctataacttacaggtattaggtcgggtgttagctaagctcaatcagttgccggatgtgatcgatgcccgccgcttgcacggcaattaaattaacgaggatatccgcgagtgggcgatctgggctaggctttgcccttttagctctgaccagtgttcgacttttgagccgagcgctggttaacatcaattctactgcgcacattacatcttgattatcataaataaaagtgaaaaaaccgctatgacgcctactgaaaccgccgctgattccaccgcttcggccttacaacgtctgttggatatcatgcgcgcgttgcgtgacccggaaaacggctgcccgtgggaccgtaagcagactttcgataccatcgcgccttacacgctggaagaaacctacgaggtgcttgacgcgattcagcggcaggattatcccgacctgcgtgatgaactgggcgatttgctgttccaggtggttttttatgcccaaatggggcaagaacaggggttatttgccttcgatgatatttgcaacgccatcagcgacaaactggtgcgccgccatcctcacgttttccctgtttcgggtcaatcggccgaggtgatggatagcgcagaaattattgccggttgggagcaacgcaaagccggggaacgggctgataaggcgctgtactcggcgttggatgatattccagacgctttaccggcgttgatgaaggcgcataaaatccagaaacgctgtgccgccgttggttttgattgggatacgcttggcccggtgctggacaaagtatacgaagaaatcgacgaagtgatgtttgaagcgaaacaggcggtggtggacgaggagaaactgggagaggaaatcggcgatttgctatttgcgacggtgaatctgtcccgccatttgggccataaagccgaaaatgctttgcaggcggcaaaccgtaaattcgagcgacgctttcgtcaggtagaacagatagttaccgcctctggccgcaagatggaagatgcctctttagccgaaatggaagccgcatggcagcaggttaaaaagcaagaaactgaaatctaacgtgttttaattcatttgatggatggttgttgaatttcaattacgttaatatattgaattataacggataggaagacggtgttcagcgcgcttttcatgagtaaaactctgcgaggcgttgagatcatttgtagcgaaaccaaggttcgagtatactactttcccgtcttggttcttccatcgtctttaaacctaaactctcaggttcagcatgacaactaattatatttttgtgaccggcggggtcgtatcctctctgggtaaaggcattgccgcagcctccttggcggctattcttgaagcccgtggcctcaacgttaccatcatgaaactggacccgtatatcaacgtggatccgggcaccatgagcccgacacaacacggggaagttttcgtcaccgaagatggtgctgaaaccgatctggatttagggcactacgagcgcttcattcgcaccaaaatgacccgccgcaataacttcaccactggccgcatttactcagaagtgctgcgtaaagagcgtcgtggcgattatctgggtgcaactatccaggttattcctcatattaccaacgctatcaaagaacgtatcatcgaaggcggcgaaggccacgacgtggtattggtcgaaattggtggcaccgtaggtgatattgaatctctgccgttcttggaagcgattcgtcagatggcggtagatgttggccgcgagcatactttgtatatgcacctgacgctggttccttacctggctgcggctggcgaagtgaaaactaagccaacacaacattcggttaaagagctgctttccatcggtattcagcctgatgtgctgatttgtcgttccgatcgcgcagttcctgctaacgaacgggcgaaaatcgctctgttctgtaacgtgccagaaaaagctgttatctctcttaaagacgttgattccatttataaaatcccaggcctcttgaaatcacagggccttgacgattatatttgtaaacgattcagcttaacttgtcctgaagcaaatcttgccgagtgggaacaggtaatatatgaagagtccaatccgggtggcgaagtgaccatcgggatgatcggcaaatacgttgagctgccggatgcctacaaatccgtgatcgaagccttgaaacacggcgggttgaaaaaccgtctgaccgttaacatcaagctgatcgattcacaggacgtagaaacccgcggcgaagaaatgctgaaagggctggatgctattctaatcccaggtggcttcggctatcgcggtgtagaaggcaaggtgactgcggcgcgttatgcccgtgaacacaatattccttacctgggcatttgcctgggtatgcaagttgcactgatggagtttgcccgtaatgtcgcgggtatgcagaacgccaactccacggaatttgtgccagactgtaagtacccggtggttgcattgatcaccgaatggcgtgatgaagacggcaacgttgaagtacgtacggaagaaagcgatttgggcggtaccatgcgtgtgggtgggcagcaatgcaaccttaccgatggtagcctggtacgtcagatgtatggcgaacccaccatcgttgaacgccatcgtcatcgctatgaagtaaacaacatgttgttgaagcagattgaagctgccggtctacgcgtagccgggcgctctgctgataacaagctggtggaaatcatcgagttgcctaaccatccttggtttgtcgcttgtcagttccatccagaatttacttcgacgccacgtgatggtcacccgttgttcgccggctttgtgaaagcggctggtgagtatcagaagcgccaggtgaaataaaatatttggtaggtggggcggcttgaatgtcgccccatctgtctggagttttagtttaacttgtactgaggaaaatctaatgtccaaaatcgttaaagtcatcggtcgcgaaatcatcgactcccgtggtaacccaactgtagaagctgaagtccatctggaaggcggtttcgttggtttggctgctgcaccatcaggtgcttctaccggttcccgtgaagcactggaactgcgtgacggtgacaagtcccgtttcctgggcaaaggcgttctgaaagctgttgccgctgttaatggcccgattgctcaggctgttatcggtaaagatgccaaagaccaggctaacatcgataaaatcatgatcgatctggacggtaccgaaaacaaatcgaaattcggtgcaaacgcaattctggctgtttctctggctgctgccaaagcggctgctgcgtctaaaggcatgcctttgtacgagcacatcgctgaactgaacggcaccccaggccaattctctatgccactgcctatgatgaatatcatcaacggcggcgagcacgcagacaacaacgttgatattcaagagtttatgattcagcctgttggcgctaaaactctgaaagaagcggttcgtatcggttctgaagtgttccacaacctggctaaagttctgaaagctaaaggtctgaacactgctgttggtgacgaaggtggctacgcgccaaacctggaatccaacgctgctgcactggctgcaatcaaagaagccgtagaacaagcgggttacgtgctgggtaaagacattactctggctatggactgtgcagcttctgagttctacaacaaagaaaccggtatgtatgagctgaaaggcgaaggcaaaaccttcacttctcaagagttcactcattacctggaaggtctggctaaacaatatccaatcgtttctatcgaagacggtctggacgagtctgactgggatggtttcaaataccagaccgaagtgctgggcgacaaactgcaactggttggtgatgacctgttcgtaaccaacaccaagatcctgaaagaaggtatcgaaaaaggtgttgctaactctatcctgatcaaattcaaccagatcggttctctgaccgaaactctggctgcaatcaagatggcgaaagacgcaggctacaccgcggtgatctctcaccgttctggtgaaaccgaagatgcaaccatcgcagatctggctgttggtaccgctgccggtcaaatcaaaacgggttctatgagccgttctgaccgcgttgctaaatacaaccaactgatccgtatcgaagaagcgctgggcgaccgcgcagtattcaacggtctgaaagaagttaaaggtcagtaatttctgccctgatacttaccagaaaaaacccgcttcggcgggtttttttatatctaaagttaatgaaatagaaactattattttttatttatatggttatacagggaataaatgagatctatcggtgattaattgaattgaaacctgttattcaattcaaaattaacatttcaacaagtcatatcaatttatatcttaattaaggttgtttttttatataaaaacaaaataagctggttcataatctgctttgaatactacactgaagtataaatatagtaataatattattactatttggtttgactagccggatcgctaaatatttaactgctgattacgctttttctaaaagccattattacctgtttgaggttctgtatccatgaaatatagagttgttatcgtcggtggtggtaccggggagacaatccttgcgattttgttggcaggtaaactgcaaagggatattgtttcaaagaaagtcgaacttatcttactgtctgattctctcatgcattattataaacctgcgtttatgtatgtagcatttaatttatttcttaaacaggaattagagagaccacaaaaaatcctattgagaccagaaatagtatttattatagataggtccgaagggtttgatttaaataaattatctttacccgcaaaggtgaaaaatacggttatgattttttagtttttgcgtccggctgcgtacctcgacttgaatgaatagaggggttggtagaaagtggcgatcatttttatccgtatgaagcgtccggcctgttagctaaaaagctagccaaaatagaaaagggcgaatttttatcatcgtctctttcccagagacatctaacgttcaccacccgtgcggagttgctccactagaaatgacgttaatgccagatgactatttacgacagcggggagcgggtagtgcgatagaaattatttatacctatccgagggtagcgcagctattgcgtaactgtctctttttacagcgtcctagcggagatattttacctaacgtctttgctgccagagatattaaatatcagagaggcttcacactgagcaaagtcgatccgaataaaaaattgcctattccgcagaaggcgaggctcaacccttcgatattttgatggcgactccacctattagcgctgttgatgcggtgcgaaattcggggctgagtgaatgggataacaaaggaggcgggttgccaaccgacccacaaacgctccaggtttatgggcagcagggcgtttatgttatcggtgataccgtttctccctatccgtaaagcgggtggtgcctgccataaccaggctcctatagttgcagataatagttgcagataatattttttccgaaatgatattgggttatcccgcgcgtgactacgataggaaagtacaggctatcgcccaaatggggctgaatgccggaatgccgctttgttatggctatcggaatgatctcttgcccaggctaccgacaaaggtaggcgtttgctacgcagcggctttaaccgcggtctttattgggcaatggtgcgtggcttaatataaatattaggagaaatactcgcgccaaagcgcgaaaccttgagatatatgctctgtgaaggcaaagttatcaatgataaattcgggctctcatgagggtgggtttttataatgatgagctgatatagcgatgaattctataataaaggattttacaacaaagagtttttataacaaaaagtcgttgggttctagcatattgattccgtttatctctcatggtgatattttctatgaactcttgcctgccagtaaatggcgttgcttaagagtttggctaatcagaatcaataagtatttaatcactatcaatcaatattaaggaaaagaaagatatgaagctaagcaccttcttgttaccccttatattttgctctggcgcagctttggcagcggatttgaccgtgactatgaatgaatcattaccgcagggaaatggccgggcgcttggcaagatagtcgtaacggaaacgccctatggactgctatttagccctcagttagctggattgacaccgggcattcatggtttccacctgcatgaaaatgccagttgcgcgtccgcagaaaaggacggaaaaatggtacccgcgttagcggcgggcgggcatttcgatccgaaaaaaacttcagcgcatctggggccttatagtgataaaggacatttgggggatttgcctggattggtcgttaacgccgatggttcagccaactatcaagtcttggctccacgcctaaaatccttatcggaacttaaacatcacgccctaatgattcatgccggcggcgataactatgccgatcatcctatgccgttgggcggtggcggagcgagaatggcctgcggtgtgattgagtaaccccctgatacaaagaaagctggccgccagcaggcggtcggtttggtgacagcgtcagaatctgcgataatcccccattacccgctttcatatagagatactgatgctgtacccgattaatgagatgttccagactttgcaaggtgagggctttttcaccggcgtaccggcgatatttgtccgtttacaaggctgcccggtagggtgcagctggtgtgacaccaaacatacctgggagaaaaacgtcgatcgggaagtcgatgtgcagcgtattttggtgaaaaccgaggaaagcgacgcttggggcaacgccagcgaacaacagttattaacccttcttcgccaacaaggctatacggcgcgccacgtggtaattaccggcggtgaaccttgtatttacgatttattgccgctaaccactctgctagagcaggaaggctttagctgtcagatcgaaaccagtggcacttatgaagtccaatgctcggaaaaaacctgggttaccgtttcacctaaagtgaatatgcgcggcgggttaaaagtattagaacaggctttaactcgggcagatgaagtgaagcacccggttgggcgaatgagagatattgaagcgttggaggcattattggccacgttgcacgataataaacaacgaattatcgcgctacagccgatcagtcagaaagaagaggccacgcgactttgtattgaaacctgtatcgcccgcaattggcgattatctatgcagacccacaaatatttaaatattgcctgatagtgagaggcgcagggctgagggatgctctccagccctgacctagccagattaaccgcggtagacgcagcctgcggagcaggtttcttttaccatgactgcgctcagctccggtaattgcggtttcaactgctgccaaatccaagccgctaaaacttcactggttgggttctccaaaccggggatatcgtttagataatgatgatccaaacgctcccaaataggctgaaaagctgctttcagctcggcgaaatccataacccaaccgctatgagcatcaacttccccggtcacttccaggcgaaccataaatgaatggccgtgcaaacgaccacatttgtggccttctgccacgttaggtaaccggtgtgcggcttcaaactgaaaatctttaaataatgtggtgctcatcatcctggccttattgactcaaaaaccgccgcatagtaccggaaactgggcgcgcaagctacgtttgccggtcttggtgcgccatccgatttactataataactataatttagcagcctatgcttttgatttaaaaccttccgcttggtcgattattggattttcggatcacagaaatttttcctaataagttgaacactttgactcgtatgtcatagcgaaaaaaccgcttagttgttttagttattaattatttctatcacttctttaattgttattatccggatggttaaccttacaaacctaaagatttatttgccgacaagatatcggactgacactggctaaagcacaagggaattcgtaccgcgatgacgactcaggctcctccaacttcattactcccgctttcgccggagcaactggcccgcttacaggcggcggtcggcgagttttcgccaacgcaaatggcgtggctgtccgggtatttttggggcatggtcaatcaacagccgaacgtgcctgctcatggggttgcagagccggaaacgccgtgtattactctgatttctgcgtctcaaaccggtaatgcgcgtcgtttggccgaacagttgcgtgacgatctgttggcagcaaaactaaaggttaatctggttaatgcgggcgactacaagtttaaacagattgctcaggagcgcctgttagtcattgtcgcctcgactcaaggagaaggtgagcccgcggaagaagcggtagcgctgcacaaatttctgctatccaaaaaggcgcctaaactgacggaaaccgcgtttgcggtctttggattgggcgatacctcttacgagtatttctgcaaggcgggtaaggattttgatacgcgtctggccgaattaggcgcagaacgtttgttggaacgtgtggatgccgatgtggaatatcaggcgcaggctgaacagtggcggcagcaggtggtgactgttttacaagctcgcgctccggcacaatctgccagcgcagcggcgcagacgctaagcggtgctgtggatgaaatgaccagcagcccgtatagcaaaactacgccacttaccgcacagttggcgatgaaccagaaaatcaccgggcgagattcggaaaaagacgtacgccatatagaaatagatttaggtgaatccggtttgcgctaccagccgggggacgcactgggcgtgtggtatgaaaacgatccggcgttggtggacgagctagtcgagttactgtggctaaaaggcgatgagccggtcacggtggaggggcaaactttgccactgccactggcgcaggcgctgcgcttgcactttgaactgacgcaaaataccacggtgattgttgataaatatgccgcgctttctcgcgatgagaaactgattgctctgttggcggataaaagcaagttacagcattacgctcatagcacgccgatcgtcgatatggtgcgtcaggcaccggcggatctgaacgccgatcagctgattgctttgttacgtccactcaccccacgtttgtattccatagcttcatctcaggcggaaaatgaaaccgaagtgcatatcaccgttggagtcgtgcgctatgacatcgatggtcgtccacgcagcggcggtgcgtctggcttcctggccgatcgcttggaaatcgatggcgatattcgggtctttatcgaacataacgataatttccgtttgcccgctaacccagaaacgccagtcattatgattgggccgggcaccggtatcgcgcctttccgcgcatttatgcaacagcgcgatgccgaaggtgccagtgggaaaaactggttgttctttggcaatccacactttaccgatgattttctctatcaggtcgagtggcagcgttatgtcaaagaaggtttgcttacccatatcgatctggcctggtcgcgggatcaatcggaaaaaatatacgtacaagacaaactgcgcgaaaaaggtgcagaactgtggcgctggatacaacaaggtgctcatatttacgtctgcggcgatgccaatcgcatggctaaagacgtcgagaaaactttactggacgtggtggctgagcacggtgcgatggatgccgagcaagctgacgaatttttaagtgagctgcgctttgcgcgccgttatcagcgagatgtgtactgatgaatgataaacaccctggaccattggttgtgactggtcaattgtctgacggcgagcggatgaaatcccagagcaattacctgcgtggcactattgccgaggatttacataacggtctgaccggtggtttttccggcgataacttcctgttaattcgttttcatggaatgtatcagcaggatgatcgtgatattcgcgctgagcgagcggagcaaaaattggaacctcgccatgccatgatgctacgttgccgcctgccgggggggattatcacgccacagcaatggctgggcattgataaattcgcgacggacaacacgctgtacggcagcattcgtattaccaaccgtcagacttttcagtttcacggtattctgaaaggaaacgttaaaccggctcatcagctattgaatcagttaggtttagatgcattggcgacggccaacgatgtaaaccgcaacgtactctgtacctctaatccggtagagtctgaactgcatcaggaggcctacgagtgggcgaaaaggatttccgagcatttattgccacgtactcgagcctacgccgagatttggctggatgcggagaaagtggcaaccaccgatgaagagccgattctgggtgcaacttatttgccgagaaaatttaaaaccacggtagttattcctccgcaaaatgatgttgatttgcatgctaacgatttgaacttcgttgcggtggcggataaaggtaaattaatcggttttaacgtgttggttggtggcggactgtccattgcgcacggtgataaaaatacttacccacgtaaagccagcgattttggttttatcccgttggcgcacacgctggcggtagctgaagccgtggtaaccacccagcgggattgggggaatcgtaccgatcgtaaaaatgcgaaaaccaaatatacgctagagcgcgtcggcgtggatgtgtttaaggcagaagtggaaaaacgcgctggaattagctttgcaccgaccaaaccctatgaatttacgggtcggggcgatcgcatcggctgggtgaaaggcattgataaaaagtggcatttgacgctgtttattgagaatggtcgcctgctggattatccagatcgtagcctgaaaaccggcgtggctgagatcgctaaaattcatcagggagattttcgcttaaccgctaatcaaaacctgattgtagcgggcgtaccggagaaagaaaaagatcgcattgaggcgctggcacgtcagcatgggctgatggatagcaacgttagccgccaacgagaaaactcgatggcctgcgtttcattccctacctgtccgttggcgatggcggaagcagaacgtttcatgccggagtttgtcacgaaaattgaaggcattctgcacaaacatcatttatctgatgaatatatcgtgatgcgcgtcaccggctgcccaaatggttgcggtcgcgctctactggcagaaatcggattagtgggtaaagcggtaggccgctataacctgcatttgggcggcaatcgtgaaggtacgcgtattccgcgcatgtatcgtgaaaacattaccgccgatgagattctggcaattaccgatgaattagttggccgttgggccaaagagcgtgataccaacgaaggcttcggggattttattattcgcgctggtgtaataaagccggttattgattcagcccgtgacttttacgaatggcagggggcggtgtgagccagtttaatctcaatgaattaaatgccttacccaaggccgagcaggcagcggcactcgcgctggttaacggtcagttggaagtgctttccgcacaggaccgcgtgagttgggcattggagaatttaccgggtgaatacgttttgtcatccagttttggtattcaagcggcggtatgcctgcatttggtgacgcgccagcggccagatattccggttattctgacggacacaggctacctgtttcccgaaacctatcggtttattgacgaattagccgagaaactgcagctcaatctgcaggtatttcgtgctgaacacagcccagcgtggcaggaagcgcgctatggcaaactgtgggagcagggcgtagaaggtattgagcgttacaatgagttgaataaagtggagccgatgaatcgcgcgttggaaacgctgggagcgcaaacctggtttgcaggcctacggcgcgagcagtcaggcagtcgggccaaattaccggtattggccttacagcgtggagtattcaagctactgccgattatcgactgggataatcgccgtatttatcaatatctgaccgagcatggcctgaattaccacccgttatgggaacagggctatttatccgttggagatactcatacaacccgtaaatgggaacccggcatgagtgaagaagaaacgcgctttttcggtttgaaacgggaatgcgggcttcacgaaagctagaaccagctttttcctctgcaatcgcattgggagccttggtgctcccaatgtcttggtggctaaccagttaaatgcaatggttagcagcgtagcctattaaaatataacgtcattttttcattaacattttcgtcgacgttcgttacagacgattattcactctgcttatctaattaaccgctgattttctctctggctaacgctgccagaaagtggctgcgatttttatagttatggctgatttaataaatctatcgattgtcgtcagcaaattttgcggcatggtcaaattgaactataccgctttgctttcgtattgtgtcggctcgatttcgatgaaacctaatacgtcgccgctctaggttaaacgcgaatctttaatatagcgctgcggatttttggggggtgtaggtaagggaaagccatcatccatcaaggcttcaacttgaattgcaaaggttttttccgcgttggcggttgtcatacccctaaacagcctttccttagatggtatacccagaacgaatttatacgcggggaatacaaaaagggcgctcataatgagcaccccgttggtacttatcggactttttaatcagattgcgaatgacttcccactaaaatgattatttatttgctccggctagctcttttaccagcggcagcaggattttgacgctatcccgcgaacgtttggcaatcctgccgggcaagtgatgatcgagataattcagattatcccactgactctggtggcgggtttcccccaatggaaaatgggggctgatagcacgttgttggcaaccgtcttttttgcctaactgatagttggtggcttcgacggaaagcactgaaatgcccgatttatcaaaggcattctgatcggcgcgacagtgaggctctggcgtgttttccgggcgactcgccgctgggattccggcattgcgcgctaacgtcagggcgcgatcgcggcttttcgctgcgaagcttttagcatcatgctggccggggttgaaatacaaacgatcgccggtaatcaaactgtctaaggtgatgaccagcaaggtgttttctttttcctctgcgctcatgcgtttcagatagtttgctgcaccctgagcgccgacttcttcagcgcttaaagcgacaaaacgcaagctataacgggtcggaatgtctttcaaccgctccgccagttcaagcatcacaccgacgccagaggcattgtcatccacgccttgcagcgtcaggccgcctaggtttttatccaaatcctgatcgctatgaggcgtgtaagtatcaaagtgggccatgatcaccacttgctgcggctcgcgaccaccgtgggcggcaatgaccgaagtggcactgaggttgcgccaactctgcttgccgtttttactggtgtaaagatagcgggtattgaaaacccgcaaattggtctggtaacccatggtttcaaattgctggttaagataatcggcggcgagcaattcggcagggctaccggccatacgtccagggaagtaggtggcaatatggcgagtttgttgctcggctattttccctaacggctcacttttagccgctgcggccgccgcattcagtgggaatacagtgctaaaacaaagcgtaacaatcgccagtttcaggtgaaggcgggaaaacatacctaaatatccttttatagagtcgtaatcgcgcagtttggcatggataacgctgcgctatgcggggcttagtatgagactgtccgcgcgattagacaatttgtatggttcctaattatcagaattttttatgtctaaatcaggaatgtcattcgacgctataagtgagcttgcctctgcaaggccgattgcatcggctttatatcattacggaacttgtaattacttttcgtcatttcataaggtcataccccgcccctatagtcaccttacgctttatcatgtaatcgaaggccgctgtggattatctaccaatatttgccgacttgaaacaacgcccggttctggtcgttggcggcggcgaaatcgctgcgcgaaaaatagatttgcttcatcgcgcgggcgctcagatccgggtagtggcgcaggcgctttcttccgaacttcagcaacagcatgacgcgggaaaaatttgctgggtggcagatatttttgcgccagaacagctggacgaggtttttctggtgattgccgccactaatgacaacgctttgaatgcggcggtattcgctgctgcggatcagcggcggattctggctaatgtggtggacgatcagccgcgttgttcgtttatttttccttctattgtcgatcgttctccgttggtggtggctatttcatccagcggtcaggcgccggttctggcacgaatactacgcgaacagctggaagccctgctgcccgcgagtctgggtgacatggctgccgtggcgggtcgctggcgtgcgagagttaaacagcggctcacgtcgatgagcgctcgtcgtcgtttttgggaaaaggcttttaccggtcggtttgccagcctgatggccagtggacaatcgacgctggcagaaagtgagctggagctctccctgatagagccgcaaagggaaagcggcgaagtggcgttggttggcgcaggcccaggtgatgcgggtttactcaccttacgtggtctgcaggttattcagcaggcggatgtcgtgctatatgaccatttagtcagccccgaagtgctggacttagttcggcgcgatgcggatcgcatttgcgtgggtaaacgggcgggcgctcactccgtagcgcaggaggaaaccaatcgcttgctggtggaactcgctcagcagggcaaacgggttgtgcgtttgaaaggcggcgatccctttatttttggccgcgggggcgaagaacttcaggtagtcgccgccgccggtattccgtttcaggttgtaccgggagtaacggccgccgccggagcaacggcttatgcggggattccgttaacccatagggatcacgcccaaagtgtcacttttattaccggtcattgtcgggtagacggtgacgggctggattggtcaacgctggcgcgtgggcgtcagactttggctatttatatgggaacggtcaaagcagctgaaatcagtcagcaattgatcgcacacggtcggtcggcgcagacgccggtagcggttattggccgtggaacccgcgctgaccaacaggtattgattggcacgttggatcaactggacacattagcgcatcaggctccggcgccagcattgttggtgattggagaagtggtggatttacaccaccagatagcctggtttgggcaacaaccgcagactgaacggccgcttaggtcgtcaatcgtgaatttggcataaaggatctgttatggacgaaaaacgactcactcacttgcggcaattggaggcggagagcatccatatcatccgtgaagtggccgccgaattcgggaatccggtgatgctttattccatcggtaaagattcctcggtgatgttgcatctggcgcgcaaagccttcttccccggtaatttgcctttcccactgctacatgtcgataccggctggaaattccgcgagatgtatgaatttcgcgatcgcaccgccaaagattttggctgcgagttgttggtgcataaaaacccggaaggggtggcgatggggataaatccctttgttcacggcagtgccaagcacaccgacatgatgaaaaccgaagggttaaagcaggctcttaaccaatatggctttgatgccgctttcggcggggcgcgccgtgacgaggagaaatcccgagctaaagagcgtatttattcgttccgcgaccgtttccatcgctgggaccctaaaaaccagcgccctgagctgtggcataactataacggccagattaataagggtgaaagcattcgcgttttcccactatccaactggactgaactggatatctggcagtatatctttttggaaaacatcgacattgtgccactgtatctggcgaagcctcgcccggttatcgagcgggatggcatgttgctgatggtggatgacgatcgtatcgatctgcaaccgggtgaaatgatcgcgcagaaaatggtgcgcttccgcacgttgggctgctggccgttgaccggtgcggtggaatcgcaggcggaaacattgccggcgattattgaagaaatgttgatatcaactaccagcgaacgtcagggtcgaatgatcgaccgcgatcaatccggctccatggagcttaaaaagcgtcagggatatttctaaggagcggcccgatgagcaacatgattctacaaaatacggcgatggcacaacaaattgccgatgaaggcggcgtagaggcctatttgcacgcgcagcagcataaaactctactgcgtttcctgacctgcggcagcgtggacgacgggaaaagtaccctgataggtcgtttgctacacgatactcgtcagatttatgaagaccaattaacgacgctgcataccgatagcaagcgcattggtacgcagggtgaaaaactggatctggcgctgctggttgatggtttacaggccgaacgggagcagggcattactattgatgtggcttaccgctatttctcgacggaaaaacggaagtttattatcgcggatacgccggggcatgagcagtacacccgtaatatggcgaccggcgcatcaacctgcaatctggcgattttgctgatcgatgcgcgtaaaggcgtattggatcaaactcgtcgtcacagttttatcgccactctgttggggatccgtcatttggtggtggcggtgaataaaatggatttggtggattatcagcagtcggttttcgagcaattcaaaaacgattacctgagttttgccgaacaattgccgacggatctgaatatcaaatttgttccgctgtcagcattggacggcgataacgtagcgacgccaagtgagaaaatggcctggtacaccggccccacgctgctggacgtattagaaaccgtggatgtggtgaacgccagtcgccagcagcctctgcgttttccggtgcagtatgtgaatcgccctaatctggattttcgcggttattccggcaccttgtccgccggtgtggtgcgcgtgggtcagaaaatcaaagtgttgccttctggagttgaatccacagtagccagaattgtgactttcgatggcgatttgcagcagggcattcccggcgaagctatcacactggttttggctgacgaagtggatattagccgtggcgatttactggtggatgccgatgaaacgctaaaaccggcgcagaatgcgctggtagacgtggtctggatggcggagcagcctctggtggtcgggcaaagttacgacatcaaagtggcgggcaaaaaaacgcgtgctcgggtggagaatattcagtatcaggtggaaattaacagcctgactcagcgagtggtagaaagtctgcctctaaacgggatagggctggttgaactggcctttgacgaaccgttggtgttggatagctatcagcgcaaccgcgataccgggggaatgatatttatcgatcggttgagtaacgtcacggttggcgcagggctgattcgggaaacgctggagtcggtttatcaggaaaccagtcagtttagcgcttttgagctggaattaaatgctctggtacgtcgccactaccctcactggggtgcgcgcgatctattgggaggaaagtagtttgcctgctcattctttgcattctgataaccagcacactttgcctgcggatgtgccagcggatgagaatgtcgtctggcattcccatgcggtaacccggcaggatcgcgaaaggaaaaatggtcaccgaggcgcggtgctgtggtttaccggtttatccggttcgggtaaatcgacgttggctggtgcgctggaacaggagttgttccggcgtgggatccgcacctatttattggacggcgataatgttcgtcatgggttatgtcgggatttaggtttttccgataccgatcgacgggaaaacattcggcgtgttggtgaagtggcaaagctgatggttgacgctgggctggtggtcttgtccgcctttatttcgcctcatcgcgcagaacggcaaatggtgcaggaaatgttagacaacggccagttcatcgaggtttttgtcgatacgcctcttgccatttgtgaggctcgcgatccaaaagggttatacaaaaaggctcgcgccggtgagctgaaaaactttaccggaatagattcagtttatgaatctccaatggcacctgatattcatctgaaaggagatcggcctttggcgcagttagttgagcaattactggaacaactttcggtaaaagccattatcagctaagcaacgaaggtttattggcaggaaaggggcgactttgcaggccccttttatcaatctttttatcgcctgttacccccggattaggcagaaacgctaagcagctcgcttttcatcatggcattcaggtgacgcaggatttcatcctcggagaaatgaagctccggaaattgtgtcattccatccagaccgcacaccagacctattaatcgccaggcaatattgccgctgtcatcacccgaacgaaactcaccgctctctcggccgctattaatgacggctaccgtggcttgatgccaattggacatcgattgggtataggcgagccggatggcatcgtcgcgctcggccagcagactcacctcattccacagccgggtttctctttttcccgcgtcatcttgcggataacccagcaccagcagcaagcgctcaaccgccggatgattttggcaggctatagcaaaggtggcgagtgattgctgaaccagcagcaggaaagcatcggctcgcagttgagagacagacgcaaaatggtggtgaacctgacctaccgccacctcggcttcatttgctacgcggcgcaccgtggtagcggccattccttctgccatggccacccgcacggcagcattcaaaatactgctatgccgctcttcgcgattcaaatatgccaaggatgctcctttgctctcattctgagatgaattaacagtttggtatgtaggggaattatgcagagaattggactgatgttcaacatttcgctacaatcgcatattgaacgcgtgttcaacattaaattctgccttatttgagtctctcattatgtctaagaaatggactattttttgcgttatcattttgatgtacctcccgatttctattgatgccaccgtcttgcatgtggctgcgcctcgccttggattggctttgtcggcaacggggagtgaattgctgtggattatcgatatctattctttggtgatggcttgtttgctgttacctatgggggctttgggcgaccgcatcggttttaaacggctggctctgattggctccgtgctatttggactatcgtcgctggccgctgccttggccgattcggtgggaacgctgatcgctgctcgcgcctctttggctattggggccgccatgattctgcccgccactttatctgcggttcggcatattttcaccgatgagcgcgagcgagcgctggcattgggaatctgggtggcggtaggtaccgctggtgccgctatgggaccattagtgggcggagtgctgctggaatacttctattggggctcggtctttatgattaacgtgccgatagtcgcggtggtggtattggcgacctgtttcctgatcccagaccagcctggtcgcagaacgcaaagctggacgttggcaccggccttggtattgaccacggcaatattattactggtttatgcggctaaaagcgggctgcgcggcaatggcgatttactcggcacctcgctaaccgcagcgattggtggcgttatcctgtacggttttatccggcatcagctttcatcaccttcgccgatgattgattttcgactgattggtcagagggtgattgccgtcggtatgattatggcgctgaccgcgatgatcaccttggttggtttcgaattgttactgacgcaggaactgcaatttgtattagggaaaacgccgctcgaagccggtcttttcctgttgccgctgatgattgcaagtggcctaagcggccctctggccggttggctggtggcaacgttaggtttgcgtttagtcgccactctgggcatagccttaagtgccgttagcttctttggattggcaatgacggatttctcctaccaaatctatcaggcgtggggctggatggcgttgctcggttgcagtattgaaatctcgttgctggcttctactgccgctatcatgagcgctgcgccgccggaaaaagccggtgccgccggagcggttgaaggcatggcatatgagctgggcgcgggtttaggcgtcgcgctatttggtcttttgttatcgcggttgtatatggcttcggtggtattgccggaagatttgcctgcgaatctggcagagcaggccagcgcttctattagcgaagcgatgcaggttatcagcgaactgggtggggagcagggcgagcgaatgtttgccagcgccagtcaggcattttcgacctcgcatagtctggtattaagcatcgctagcggcatcttgattttactcaccgcagtggtctggtacagcatgccgagaaaagaatccgaggctaaattgataaatatatcaaaacactaatgatagaaagaggcgaagatatcgcctctttttttgcccgtaggctactgatgtcttcgttgttccccgcgctccaacactgctattgactattcgcttgaatgacgaacaattagtaacatatttgattgaacaattgttagacgtactgcgtgagagagctattatcaaatcctgaatgtaccctcggccaagcgcctacagagcgcgccgttaaagaatacccttagggatttttatgcagaatgtcacccaaattattgtgagcaaacagcgagaaagggaggaaccgtcgcactcctttctcggcggaaccgccggttttaccttttactggctagctttcgccattccatttctagtctacgggccaaacaccgttttcttcctgctttatacttggccgttttttctggcgttaatgccggtttcggtattaatcggcgtcgccttaagtatgttgctgcgcggtaatgtgctatttaccctcggtgggacgggcattgcggtgatatgcctgttttggatgctgttctctttcctcaccggatggtaaaacgactggcgggtgctcgcggcgaaaattatcgccagaatgcccctatgacctttttaatcctaagcttccattgtgtttttcctcttgctttcctcgcttattacccgttatttttacgcactttttcccttttccctcgcggaaaagtaggtgtaaaggtaaggcaaaatgaaaagtaaaagccgatttagcagtttttccggctaagaaactcacggaggaaagggaatctatgacgactgtcgctagtatagcgtcccaataattgccgttgttttgcagatttgcgtggtatttttgccagaaatcgtccttaatcttaaactctggggcattttcccactcagagtggagtccgacgaaaagttgtgggatgattagtcagtttttcagggggcggagatgggaaaacttacgctactattgttggttttgcttggctggttacagtattcgctgtggctgggtaagaatggtgttcatgattttgtccgcgtgcaaaatgacgttgcggcccaagagggtaacaacggcaaactaaaggcgcggaacgatcagctatttgctgaaattgatgatttaaacggtggtcaagaggcgatcgaagaacgcgcacgtaacgagttgggcatgattaagcccggtgaaagtttctatcgtttggttcctgaccaatccagacgtaatgcgggtatcccttcgacacaaaataacgcgcaacaataaataatgagtaacttcgcaggttcccttcctgaagtcattgctgtattgccggctgctggaataggcagtcgtatgcaagccgattgccctaagcaatatttaaccgtgggcggcaaaacaatactagaacacgctattgatgccttgctgcgccatccgctaattcagcggattattgtagtaataagcccaaatgatgaacagttcgatcggttgccgattgccaatgactctcgcgttagccgggtttatggcggcgcgcagcgtgccgattcggttctggctggcctgatgagcgccggaacgcctgactgggtgctggttcacgatgctgcccgcccttgcctgcatcaggacgatttaagcaatcttttggcaattattggtcacactaaaatcggtggattgctggcgaccccggtgcgagacaccatgaagcgcggtgaatgcgggattgaagcagtggcacatacggtcgatcgtcaggatctctggcacgcgctaacgccgcagctgtttccattcgaattgctgaaaacctgcctgagccatgcgttacgtgaaggtgcaacggtaactgatgaagcctccgctctggagcactgtggctatcacccgttactggtgagtggccgttcagataatattaaagtcacgcgcccggaagatctggcgctggccgagttttacattacccggctctataataaggaatgcacataatgcgaattggtcatggttttgatgtacataaattcggcggtgaaggcccgataatcatcggtggcgtgcgcattccttattcgcagggcctgctggctcattccgatggtgatgtcgctctccatgctgcaactgatgcactgttaggcgctgccgcattgggtgatatcggcaaactctttcctgataccgatcccgcctttaaaggtgctgacagccgagctctgttgcgtgaagcttaccgccgcatccttgaaaaaggctatcagcttggcaatctggatatcaccattattgcccagtccccgaaaatggctccccatattccgcaaatgcgcgtgaatttggcggaagatctgcaatgccatatggatgacgttaatgtgaaagccaccaccacggaaaaactgggtttcaccggtcgcggtgagggaattgcctgtgaagccgtggcgctgttggtaaagagagaaaagcagtaatggacatggaaaatctaacatggctgcacggccaacctaaagcctgcggcgtgttgaaagcaaatcctgaagatttcgtggtggtagaggatttagggttcgaacccgacggtgaaggtgagcatctgttggtgcgtattcgtaaaaacggctgtaatacccaatttgttgccgattatttatcccgtttcgccggtattcatccgcgtttagtgagctatgctggcttaaaagaccgtcatgcggtgaccgagcaatggttctgcctgcacttgccaggtaaagaaacgccgaatatgcaggattttcagctggaaggctgcgaagtgttggaagcggtgcgtcaaaagcgaaaattgcgcatcggttctctcaaaggtaacgctttcactctggtgttacgcgatatcagcgaccagcaggacgttgaggctcgcttaaatctgattgctgctcagggcgttcccaattactttggtagtcaacgctttggccgcggtggcaataatctggtgcaggctcgccgttggtcgaataatgaaattcgggtaaaagaacgcagtaagcgtagcttttatctgtctgctagtcgcagtgccatgtttaatctgattgccagcacgcgtttggctcaaaacagcgccatgcaggtgctggagggggatgcattgcagctgagcggccgtggtagctggtttgtcgcacaggcggaggagctggagtctttgcagcagcgtttggatgccggagagctaaatgtcactgcgccgctgccgggagacggcgatttaggcactcaaggcgcagctttggcctttgagcaaaactgtttggcggatcaaaccgaactgctttcgctgttgaaacgtgaacgtgtggaaggtgcgcgccgcgccatcttgctgcgtccacaggaaatgagttgggactggtgggatgaggttacccttgagctgcgcttctggctgcctgccggtagttttgctaccagcgtagtcagagaaatcatgaatctggataacggcgatgctgcggatcttactgagtaacgacgatggcattgctgctccggggattcaaacgctggctgcggcattgcgtgagtttgctcaagtgcagattgttgcaccggatcgcaatcgcagcggtgcctctaactcgctgacgctggattccgcgttgcgaacgaccacattgtcaaacggcgatattgctgtacaacacggtacgccgacggattgtgtttatcttggcgtgaatgcactgatgcgaccgcgtccggatatcgtagtttcaggtatcaatgctggcccgaatttaggggatgacgtgatttattccggaaccgttgcggcggcgatggaaggacggcatttgggttttcctgcgttggcagtttcgctaaacggccatcagcattatgatacagcggcggcggtaacctgccgcttgctgcgcgctttacagagcgctccactgcgtaccggcaaaattcttaatgtgaatgtgcctgatttaccgttaaatgaaattaaaggtatcaaggtcactcgctgcggcagtcggcacccagccgaaacagtcatttgccagcaagacccaagagggcaagatatttattggattgggccgccgggtgacaaatgtgatgcagggccggatactgattttagcgctgtggaacagggatatgtttcagtgacgccgcttcaggttgatttaaccgcctatgcggctcaagacgtagtcaaaacctggttagccaggactgaggttgacggggaatggtaaataaatccatgcaaaccttactgctacagttacaacagcaaggtattcgtgatgagcgcctgttacaggcgattgaagctgtaccacgggagcgctttgtggacgaagcgctcgcgcataaggcctatgagaataccgctctgccaattggttcagggcaaaccatttctcaaccttatatggtggcgcggatgacagaattgctgcaactgacgccaacatcgaaagtattagagattggtaccggttcgggttatcaaactgcaattctagcgcatttggttgaacacgtgtgctcagttgaacgaatcaaagggctacaatggcaggctaagcgccgcctaaagttgttggatctgcacaatgtttctacccgccacggcgacggttggcagggatgggcatcgcgcgggccatttgatgcgatcattgtgacggcggcaccgccagagattccagaagcattattgcagcagcttgaaaacggtgggagattagttctgcccgtcggtgaacaggcgcaaacgttaaaatatgtgcagcgtagggatcacgagttctttattgaaacggtggaggcagttcgttttgttccgttggtgaaaggggaactggcctgacaattttttaaatcgcgtatttaatcccagcctatttattccggccgggaacccattgggttagcgcgatatgtaaattatacgagattacggtagggcagaggtggtgcaatttgtacccaaggtgctgcatcttatttcttctgcgtttgaccttattattcaaggcgcgcagaggaacctttcatcattagaaaaatgagtgaaacattgacactcagctaggatgtaaagggtatttggaaatatcgcttaatattgctgtcatgggggaagcatgagcacgggaagcccaatgattactttacgccggattgcggcgtgtacggttgtgagtttgtggttggctggttgtactaatgatgcatcaacgtctgcgccaatatcgaccgtgggtggtaaaacatccggttcgatgatgagtggaagtaatgcatcaggcgatcgtattgtttataaccgtagttacaattctatccctaaagggagttacaacggcagcacctatacggttaaacggggggataccctgttttatattgcctggattactggcaatgatttccgtgatttagcgaataaaaacgccattcccgagccttatagcctgaacgtgggccagacaatccagctgggtaacggttccggcggcggtatgatggcggcaactgacgctacctctaatggggtatcaaaaccgccttcaaacatccaaaacacagcttcagcggttgattctcaatcaactaacgcgtattctggtaactcgggtaaacagaatgttggtaaaatgttgccagcatcaggagccgttgcatcaacaacagcacctgttaccgcaccgggcactcccgttggcatccctaccagtaatggtggtccagttagtagctggaaatggccaaccgacgggaaaaccattgatagcttctctgcttccgaagggggcaataaagggattgatatcgctggttcgcgtgggcagcctatcttcgccactgctaatgggcgggtagtgtatgccggtaacgcgctgcgtggttacggtaatctgataatcatcaaacataatgatgactacctgagcgcctatgctcataacgatacaatgctggtccgggaacaacaagaagtgaaggcgggacaaaaaatagcgactatgggtagcaccggaaccagttcagttagattgcattttgaaattcgttacaaggggaaatccgtaaacccgctgcgttatcttccgcagcgatagattgggcagaatacgctgtattctgctcgcggtatcacgggtaggagcagcttatgagccaaaatacgctgaaagttaacgagttaaacgaagatgcagatttcgacgaaaacagtacggaaactgaaatttttgatgaaaaagcattagtagaagatgaaccttctgaaagtgaattagcagaggatgagctgctggcccagggcgttacccaacgcgtgctggatgctacgcagctctatcttggtgagattggctattcaccgctgctgaccgcagaggaagaggtttattttgcccgacgtgcactgcgcggggatgtgccgtcacgtcgacgtatgattgaaagcaacttacggctggtggtgaagatcgctcgtcgttacagtaaccgcggtttggcgctgttagatttgatcgaggaaggcaatcttggtctgattcgcgcagtggaaaaatttgatccagaacgcggttttcgtttctctacttacgcaacatggtggattcgtcagacgattgaacgggcgattatgaaccaaacccgtaccatccgtttgccaatccatattgtcaaagagctgaatgtctatttgcgcaccgcgcgcgagctttctcataaattagatcacgaaccgagtgcggaagagattgccgagcaactcgacaagccggtcgatgacgtgagccgtatgttacgcctgaatgaacgtatcacttctgttgatacaccgttaggcggcgactcagagaaggcattgctggatattctttccgacgaaaatgaaaacgggccggaagacaccacgcaagatgatgatatgaaacaaagtatcgtcaaatggctgttcgaattgaacgctaaacagcgtgaggtattggctcgtcgttttggtctgttaggctacgaagctgcaacccttgaggatgtaggtcgggaaatcggcttaacccgtgaacgtgttcgtcaaattcaggttgagggcttacgccgtctgcgtgaaattttgcaaacacaaggtttgagtattgaagctctgtttcgcgagtaaaaagcttatcggcagcctgaattaaggcaatagataagagagcgaaaacagattcagtattcgctaaatcgaagcagtgttacttcacgatttattgatgatagaagtaaattctgttgctgggttaaataaaaacggtggacatctcgtccaccgttttttttcgactgaaaccggccctttaagaagatggtttcttattatcgagcaatttggcctaaggcactgactgattcagcgccaaaagagccggctagaaaaatagctttaatcgcaaaaatcctaaccgataacgccatattaccttacaccatacttttcaggcgatagagccattccaaggcctgacgagggctaagcgtatcgggatctaaggtttccagtgcttccactgcaggagaaacttcttcattcagcagagtaagctgggagccatcaatattgctacccgctgcattgttggagagtgactcaagctcccgtagcttttgtctcgctcgtttgatgacgtcacggggtacaccggctaacgcggccacggccaaaccataacttttactggccgccccgtcctgtacggtatgcataaaggcgatagtatccccatgctccatggcatccagatgcacgttaaccacgccttccattttttccggcaaggtggttaattcgaaataatgggtagcaaatagcgtcattgctttgatgcggctggccagattttcagcgcaggcccaggccagagataaaccatcgtaggttgatgtaccacgaccaatttcatccattaagaccaggctttgttctgttgcattgtgcagaatattggccgtctcggtcatttccaccataaaggtagagcggccagaggcaagatcgtccgcggctcctacacgggtgaaaatacggtcgactggcccgatagtcgcctgttcggcaggaacaaaacttcccatatgagccagcaacacgattaaggccgtctgacgcatataggtacttttaccgcccatattcgggccagtgatgataagcatccgacgctgtggtgaaagtgataacgggttcgcaataaaaggatctcgtagcacctgttccaccacgggatgacgacctgcaacaatcttaatgcccggtttgtcgctgagcgtggggcgcgtgtagtttaacgtttctgcccgttcggccagattggttaatacatcaagctcagctagcgcgttcgcactcagctgtaggtcggatagatggggtaataatagatcgaaaatttcttcataaaggcctttttcaatcgctagcgccttacctttggaggtcagaactttatcttcatattctttaagttctggaatgatatagcgttccgcatttttcagcgtttggcgacgtacatagtgaattggcaccaaatggctttggccacggctcacctgaatgaaatagccgtggacaccgttaaatccaactttgagcgtatccagccccagtttttcccgctcgcgaatttccagtcggtcgaggtaatcggtagctccatcggcaaggctacgccattcatctaactcagcattgtagcctgaggcaataacgccgccatctcgtactaatacaggaggagattcaacgatagcgcgttctagcagatccaagagttcttgaaatttacctacctgcgatagcaggttctgaacgtggggagcctcaacggaactaagcaattggtgaatttcaggcaattgctgaaatgcatggcgcatccgggccaaatcgcgcggtcgagcggtgcgcaaagccaatcgtgccaaaatacgttctaaatcaccaacctgccgcagtggctgctgcagttccgcagtgatattttgcaaaccactgattgcctgctgacgatgattgagcacattaatgtcgcgaataggcatatgtaaccagcgttttaacatccgactgcccatcggtgttacacactgatctaaaattgccgcgagagtattatcacttcctccggataaactttgagtcaattcaagatttcgacgcgtagcagcatccataataatgccgtcttgttgccgttccatcgttaacccgcgaatatgtggcaatgaggtacgttgagtatctttaacatattgcagtaaacagccggcggcacgcagggcttgatgggcttgttctacgccaaaaccgataagatcgcgggtgccaaactgtaagtttaattgctggcgggcggtatccagctcaaactcccacaaaggtcgacggcgcagcccgtgtcgctgttcaatcaacgacatctgttcgaaggtttctggatacaataattcagctggattggtccgctgtaattcggccgccatagtttctgtatcagcgggttcggaaacgcgaaagcggccagagctgatatctagagtggcataaccaaacccacgggcgtcctgccagattgcggctagtaggttatcctggcgctcatttaacaaggcttcatcactcactgtgccaggtgtcacaatgcgaaccactttccgttctaccggccctttactggttgccgggtcgcctatttgctcacaaattgcggcagactcccccatttggacgagcttagccagatagttttcaatcgcatgatgaggaacaccggccattggaattggctcaccggcagaagcaccacgtttggttagcgagatatcaagcaattgcgatgcacgtttggcatcatcatagaacagctcgtaaaaatcgcccatacgataaaacagcagaatttccggatgctgggcttttaatcgtagatactgctgcatcatcggggtgtgagcgtcgattttgtcggtattattcatgcgtatatatttctaatccattgaaattaaagttaattgtgattttaattgttatcgttaattatcacggtaattcagcataggtaaatactacgtgaatgtggcctaagagcacagcagctctgatcacgcagggggcggtaacctcgcatcggctcttgggacatattatcccagcaactagcaaactgacacgggtaaaagctggaggcatctcgcaaagttatcctgcagtgataggacaacaagcgtagtcgtgcagtacgcactaggttgccgctatctctgatctgtctgtggtaaagaaattttacagataattattttctgcaactcattcgcagtgcagatcaattttaatcataaaataccgatctgtgctcaacaataatcttataacttttttgccgcagctatatatgttgtgcagcgggccatggaatctttgtaatattcattagatagatgaaaaaataataacttataaataacattagaatgttctggcgaaaaaattttcacggcatgaaataatgtagtcgtcaaatatctttaattattcgttcaactaaagttaagattgtgtcacggttagtaatagtccagttattttccttccttccaacatgtgtttatcgatctgtatagctacgattttatcactcatcataattgactcatcatcatattctactctgacactaaactggatgtgtttttcatttgttagaaggttttcagctattttcatacgaaagggatgatttcttttcattttttttgttaggaacgtaaattcctgaattactctgtctttagttgtttctggattcatgttgcttacagtgattattatccgtgagttttccggtatttcctgtattgatgaagaaacgttcccttcaatagaaaacgaggagtgaaaataatgggtgctcatactacaaccagttagactaatacatatggctacaaatagtggaataaataaacgataatttttaaaaataaaaaacatatatagctcattaaatgctaataaaagcgtaggagaataaaattgcggcaataataaaaaaagaagatgctatttttaatttaatatctttaattatgttaagaatctttgtttttgatggtgttgtaggaatgaattcttcttgtgtgccgacgaatctaacgccaatgcgtggaagagtcattattggatcttcattttcacctatcattacaaatgattggcgaagttgcttgataagtttgtagtagctactgtccgtaacaatgacaccacgcgattcccaaatggtatatagtatttctcttttctcacaggttttttctaagagcatttgcaaaagacgtgactcattctcagataatcttatttttttttcatcattaaccaagcttcgttgtaatgtatcaaacacgatgctgccattcagtcgtatggttttccctttgtgcatataatcgtttccttatatcaattcatttacacagactattctgatgttcgtgaatcattaaacgatataaattaggataagtctaatattcttggttcactaaatggttgttataacttattacaagatggttattgataataaatatgaataaacaaaactcgaaacatatgaattaagttgtaaaggtaattaaattacagatggatataagatatttaaactatttttaatgataagatggtttgtgagttgtaacacatattaatttactataactatatttaaggtgtgttagctaacacttgagattttgtctctgacaaatcggcatctgaatatactttttccattatgagtttggcatatttatccctaaatctgggggtttcagagtgataggctcctacagctttccagctataaccatattttttaaacttgagactaagcaaataagccccagcctgaatgttaatacatggagatttcaacatatttgcgttatcaataataccagccgattgcagtaatgagatattaattgaatttatctgcatcaagccaatgtcatgactgccattctcgtttttattcttcgcattgattttccaggatgactcctgagaaataatagattcaagaataacagagggtacattccatttttcggcggcagagtttagacatgtcgaatgggctgatccaacagagaaaagaaaataatatataatcggtgttaaattagaaaatgtcttcctcatcatcactctcaatgtaactaagttgattgtttaatatactgctagtgaactctttaagggttttattaatgatggattcgtttattaaaaatggaatgataatgttggacgaaagctctttatcttctttacttccgcttgactgtagtaaagtattagcatgaacaataatactagattttgtattattatcattgccattaagcttttctgaaatcactttataggcctctttcaggttttttaattggttgatttttatattattaacaagttcataagccaatttatcagaagcatcattttttaatgattgaatgttaattttgttcatttctattctcttggcatttccggtattagctataactttattcaggttgctcgttattttcattttcttctcgctggttgcatgtggtcaatcttattatttctctggttttttttaagttaacaattccgttaatattcaatatgtgtttttttattggtggaaatatttcttgcaagaattcaggacggtctttatttggatcaaatactatgatttcatcacctaccttgagaattatattttcctgattactttctatgacataagattcattcttcaggtttcctattattttagcgtaatgaattttgggaatgtgtagttcaatatttggtgatgatattgaaaagccatgaaaatgctcagaaaccaattcgataaatctcgtatctccaaatatttcctgtaatttatttttaagtctcacctcaatattggcaatatttttgttgcatatttcttgatagaggcttattgctgaaatgacagtgtcaataaataaaaaaatcccgctcttgaagccaaaattatgtgcttgatcagttatatgtttgatttcaacttcagctttagacaaccttttttttgcttctttctttgcgtattcgattatgcgtacttgataagcattagaactaatacagcacctcttgataagtactttttcatttgatatttcatgcaagggtgttttttttacttttaacatgataacaaaccatttctatcaaattgaagggtagtctcgcacattgcaatgtgcgcatgatgttcatcacacgttggctaaatacgcgttcagctctgcttttcaatgttgtatcgaaaaaaataatcgtttcaacaagttgtagtgcgccaaaagccattatataatttggggtaacatatttttctttatacttttgtaatatgtatttgaacttaggtagcatattgtttcttaactctatatcatcatcggttaataaatatggatgatgttttgtatcaactccaagtattcctaatctccaggctatatctggtaagttaccccacgattccttaatcaccttaggaatgcagagtgacagcttgcgtggaataggtagttgatatttagcaattaaataattattttggaaagcctgaagataaattggtgagttattatgctccattattctgtgatcagaatgaaagtagcttccaggtgatagcaatatttttaaatgatccattaaattctcctattgggtattgatctttttggatgaaccacttcttttttccataaaacgtgcggaattacgaaaatagaagagcatgaaaataattaagttagtgattaggatgattatcaaaatataatatggattaaaagtattagatttactatctagtgatacactacgttgaataatcggacgttcaacaataactacagagacattgtcatatgaactgtctgaaaaactattttttaaaaaaagttttattttagtcatcaattggtttggatcttcactaccagcataagtcactaaacaggatatattttgctgctgagtagtcctgctattatttaatagaggataactcacatgcactctggcattgacaactcctggtatggtcaaaacagattgttcaagccgctgttcaatcagtgaaagtaatctggctcgttctgcatgaggtgaggcaactaaagaatcactgggaaatgcctgaataatttctacggattctttagaaggcaagttatattgcttgagtaaatctaccgccgcaataaaatcatttttagaaacatgaatggagtaacccaacttgccatttgccttttttttaccctgaataccgtattgttgtaaggtcgccaagacttcattgctttgacgctgatctagctcggttagtaaatcttggctatcgcagccagtcaaaaatagggcaatggctgcacataatataaaccggcttattcgcatcattattgagattttatcgtagtttctacagctgaaatagctttacgaaccaatgtattcgccagtgatacaacttcagcatgttttcccaatcgtatctgaccgactctgattaattctgcggaatcagttatatttccatgctcgattaaattaactattgcagctttctcctgactggttgctgcagcttgctggctgaacaatttttttattatcccttcgatctggcctgctccgtcgaaaacggattcaccaatatcagggagctgatttttaaatgaaattaaactggttaaatgactcatgtgcaatgctctaatttatattatatagttctaaatattacgaataatcccggatgtaaggtcgaggagtttctttgcaacgttagattgtgcttgcctaagtgcagaatattgacctagatacaatgtataatctattaacttaattgggttagagatatcttctatagcacttttttgcgccgcctcgattttattcattaggtcttttgtgggctcagtgaatttcccagcaatatcataagcaaagtttgctgtttgcccggatagtggtgtcgtgttttcaaagttcttaacggtatagtttggcgtggataatgttgtcgttggcatgataaatttctctttattttcttagtaagaatgttgtttaaaatcccaatgattgttattgatttttatattttcatttatatcattaataaacactccttcatataattcattatcactaagtgaaatagagaattgaatgtaattactcccccattcactaatgaattttttgacaaaattcatggttgatatcagttgattgtcactaagatttgagcttacaaccacaataggttttttttcatcttctataattctgaatggcacattacttgcttttattcctcttattgcatcatcaaaaattgcttttttatgataaaacttaacttctatctcgttagcacagctaactctagattttatcgtttcatttattttttctacttctgataagtaatccgagcttttcaataacttaacaataggtgagcaaggataactcatatcaatatttaaaactgacgatgaaaagggggtgattaaggacattagctctttctctaactcgctaactaaaataatgtcaactaagccagcatagtttgacgtgagcaattgctgagatacccagtctgcatcgcggcggctatttacaatgacttgatctttccctcttccttctgcttgcagaataatggtgaaatgaattgatgattcacctaaaagtttagatatgttgcttgtaatgattttatctacttgcacattagaattatgattgttagtcatgactgttaataaaatcaagccaacagttaacattgaaataaatataataattaaatgcttagatgttcctctctttatcaagcttccatttttctgtggtagagaagagtccattgtatctttttgtcctagctcatcgaaggattcataattccatgaatcatcgatcgacttaaccagtataggaaacgtatcggggaataagaccgtttgtaatatgacatcggtagtcagtttaggtgtgtctttttcattatctaaatcttcaaaaatgactgatagtttagcatctgatttgtttgcttcattggtataggatgaaaaaaaagttaacttataattgccagtatcaataggaaaaaagtaactgattaagtcattctcttcatcagtcacaacgttatagtctgtctctgtgttcgcaaatatcaggcaacctttagatttaaacaataattcggtgccagtcattcgaccagaggctatttttattatataaaaatcggcgttattattcatagcaacgaaggttctattggtgtaaaaatcagtcattaatgatgagctgtatttcttaaagagaatacaactaaaatagttcgcatacatcttttaaagtttggttattattgccgatttgaatctattactcatcggaataaatcgcactaattcttatcgtttctggtaccggcatccttttataaaggatgtttttttcctaataattccaaagaatgtgattgttgctaattgtagagtataaccagattttgtttaaataatcagatgctacttcctgttaaggttttttattcatgagtataagtaagagcaacaataatgtggacggagaactacctgctcttgattgcatgattttctatgtcaggccaatggtgaaaggttctatattagaatacccatcatttatacggaaagaaaaaggtctggtactggattcctcacttttaattgcgccgagtttggatgacttaaatcagatttccggagtttggagtatcagtgggatacctatatttagtgctattgaaattttagcaacgcttgatgaggctaaatcacaatcaaataaaggtaaaaggcctccatccgatagtgaaatcaaatttgaagattctgtccctgtctggtatgacaggaattattcaacctggcgtaattctgaagtgagtggtttacttatttctgaagtcatgaacggggggggggtattatttatcattattaaatattcttcgccggtatgaggcatatggaatattccgttatcttatttcacagtcagctaatggagaaaatataaaaatatctcagttgagcaaaaattatggattatcgtccccctactttagatttctgtgtcgtaaaagttttaattcatcggcgaaaaaaaagatgatgagttggcgtatggcaaccgcggtcttactgctaattgaaagtgatatgtcaatattggatgtggggttagcttgtggttactgctctgcatctcattttacattagacataaaaagaaatttcgggctcactccatctgagataaggcacctggagagtggtttatatgatagttaatccataccttttctctaaaatattaattttatctttattaacttttagctatgcctctccaggatttggagaggttattaccgctacgccggtagaccgggaaaaaagtcagagttcatttattgccaataatataacgattaataaggtatttgacgtcgtttcatccaggatagaaaagccgattattcttagcaaaattgcaatgcaaaaaaaagtgactggcaattttgacatgtcacaaccggaagaaatgtttaagtcattagctagacggacggctttaatatggtatgacgatggaaccagtatatatgtatatgataatagtgaaattcgcaatgaactaataaacttgcgttcaacaagttggagtgagttgcttaactatattaagaccactggaatttatgactcgcgttatccactacgttcagagggtaaagcatccgtagtctatgttgcaggccctccactttatgtcgaattagtattagctaccgctcgctacttggatgagcggattcaagtcgaagagaaagcagggactgatgtgactattatcccgttaaagcactcgtcggttaacgatcgtgtttttagccaacggggcaaagccgtgacgattccaggcatggtcaccgttattaattcattgttcagtaaaaatgctttgggtaacaacgttcatgttattccgcgtgaagatatttcaaatcagatagaaacaggttttccgttaccaccggcggcgctggatttggcgcaacaaaattacggagctattactgacacgggaagtagtcacttttccgtagttgcttatcctgatagtaatagtctgttagttactggttccgcgcaacaaactcgctatatatatcaattagttaacgccctagacgtttctcgtcggcaaattgaactttctctctggattattgatatatcgaaaaaaaaattagatgaagtgggcgtccgttggcaggttggtagcgtaaccgcaggcgggggtgacattgtttttaatcaaagcaatctgtcaaatagcgccaggtttttggcacgtattgatgcaataagccgtactggtgatgctcaaatagtttctcgtcctatcgtattgacgcaggaaaacgtcccggcactttttgataacagttcgagtttctatgctcggctggaaggtgaaagggtcgcgactctcgagcaggtgacctacggcactatggtgagtgtattaccacggatttcgcacggagggcaggttgaaatggacgtaaatattgaggacggttctcccggtcgtagcggtagcggggatgtagaaaagattggcggtttacctgtagtcaatagaactcatatcagtactgttgctcgaatagccaaagaaggcagtttacttatcggtggatatacccgcgaacaattagaagaaaccgaggagaaaatcccgctactcggtagtatcccttatttagggcgactattcagctatagaagtactaatcaacaaaaaatgattagggtttttctgatccagcctcgtttattaagtgagtcagaggcctgggatggtaggcaattttcagaaaaagagcgtttgagcgatagaataaaaaacaaaaatgaacagctacaaggaacgataaaattattgcagaactatatggatagtccatggccatagccccacttggtggaaactcacgttatatctcggcgcaacgtgataagaatgaggaagctcaaaacactgctggtgacagtgagaatacgctacgtgggcaaggcatcatcgataacactagcgaatatgcatcaatggcgatgttagcctcgcagtttaatcggcgcaaagaattacgttcatcgagtgatgataatacgatatttaccgagagaattttggatgataacgctgacgagaaagtaagtcatattgaaaaaatcattaatcgcgaggaaatgactcctcccaaattacgttcttttctggctcagttgtttcctgataccagcgacatgttgatggttatttttgagctcctacgacgaaaaaaactaaccagtaagatcgttagtaatttaaatacgttgaaaagtgtcttaaccgaagaagatacagagcgtaggactgaagcgggcgttaacgtagcattatcggcaaggttgttctcgcattccttggataagacatcgattcaactgcgggatatatatcgtgactttatttgctacgatggcccaatcatttatatttacgaacaatgggtaagtgaaataacgagtcagcaacgagaaattatgctgcgttacctaacacgttcactagcttgcgatttgcaatctatccctacaggaaatattaacgttgtagaatttggtgatctattccgtagagttggtggtttaagggagattcaatcagttgagattcattttctgcagaaaataatgagtacagagcttataagcataagtaatgatcaagaattgtctaatcttttcgtttctgggatcaggaatatagataattataaaataagtttggccaagttttattctgaaaagttatcattagtgacatatgaaaccaaggctatttttttacagttgttattgagtggtttctccagtgtgtctgtagatatttttttctcgttagagaaaagggacaaactcatccatttaatgaaagaaaaaattagccagataaaattgaaagaagatgcagtgaaaagaataaataaagttaagagtagggatgaaaatgcgtagactgtcatggttcctgcttcaacttaggagtaagcctgagttaatggttcttttggtaatggtgacagtgatagctatgctagtcgtccctttaccaactttcttaatcgattttttgatcggtttgaatatcatgatttctgtacttatttttatgggttcgttttatatcaccaatattcttaacttcaagacatttccctctattttacttattagtactttatttagactagcgctctctatcagtaccagcagactgattctattagaagctgatgctggagatattatagctacttttggcgagtttgttattcaggacaatttagtcgtagggatagtcgtcttcgccatagtcactgttgtgcaatttattgtaatcaccaaaggttcagagcgtattgctgaggtggcagcgagattctctctggatgccatgcctggcaaacaaatgagtattgacgctgatgcgcgttcgggaattattgataacgatcaggtgaaaataaggcgaggcgttctagaacaggaaagtcagttatttggttcttttgatggcgcaatgaagtttattaaaggtgatgctatcgccggtatcattattatttttgtcaatcttgttggggggatttctgtaggtgttgctcagatgggaatggatatgtccgctgcactcagtagttatacacttctgacgatcggtgatggtttggttgcgcagatccctgcactgctgatttccatcagcgctggttttattgttaccagggtgagtgggaatgataaaaaccttggggaaaatattgtatcagagctattttataatgacttttctcttctggttactgcaattataacttgtactataggtttcttacctggatttccaacgttcatatttattatactttcctgcctactttttggtctgtatttttatcggttctataaaaaaagtaaagaagataaatcggttaataaagtacctacgggagttatagatactcctaataatgttactaccggcgagaccatcaggactatagagaacattgatgattatgttccagaaactctgcctataattgtttcagtgtctgttgttcatcagaaaatattagaagatagagacttttcgctaaaaataaaaaaggatattttcataaaatttggatatagagttccagatatagcgataaattactcccctaccatcgagcaaggaaagataattatcttgatcaatgaaatatttgctggcgaatttagtataagattcggtcatttaaaaatcattggttcaactgatgaactggacattttaggcatagagttatttgttatacaagaagataatggttcttcgagtaaatggattgatagtaaaaaccaggaaaatgcgacggcgctaggtctgaatttttgcgatgatataacggaaatggtcggttgcattagcgggttattattacgtcatatccacgagttttttggtattcaggaagccaaaaatttattagatgatctggaagctaaatgtccagaattactgaaagaatgttatagacatgccacagtacagaaaatcaccgaagtatttcaaaggcttttagccgaaaaaatatcaatacgaaatatgaagctgattttagaatctttagtgcaatgggctcctaaagagaaagatacactgatgttagttgaacatattcgatgtacgttaaaccgatatatatcagataagttctcagttttaggcgtaatgaatgtattaatgcttggcggaggtgttgaagatactatcaggcaaggaattcgacaatcatcaggagggacatttttaaacttagagccagataatgcggaaaaaatagttcaatcactatcgctggcaataagtaatgtaaatatctctttgagagatttgatagttctagttcctgttgatattcgccgtttcgttaaaaaaatcgtagaagatcgtttccctgatttagaggtgatctcctttaatgaaatttcagaatctacaaaaataaatgtaataaaaaccatatgaatggagtttatatgaaatataaatttattgaaatgcttaatgttttccttagctcggtagggcgtgatgatttagttaataaaaatcttgattgccactctaccgttcaacttgagcttgacggaaggcaggctattaatgttgacatgcacagtgatgatattattctctggatgtcactatctgaatacattccttccaggatcgagcaggtcagcgttaggttacttaactctatattagagtatcagtcttcttgctttcaaccagggcagccagcgttacttgttcatgataatttattaattatgagcgccgttttaaatagcgcagctttggatgatttgagtttgtttgctaatagtctggaagaattcttcgatcgcagcacgcatcttgaagaaattttaatttattaaattatgagattatttgactatggcgctcatccaacccgaataagcggtgtattaatcgaggctccattacctaggtgtttcatcggcgagatatgtgtgattaaacgttctttgactaacggagagttaatcgctaaagctcaggttattggtttctgtgccgggcaaactctattaagtctgataggtcgagttcagggactttctctggatgcggtaattttaccgttgggtaaaccctttcagtttcctatgagcgagtctttgttaggaaaagtatttaaggcctcgggtgaggagattcagtctttctacagctcttctgaacctccagataaccaaccgttggagtggaggaacatagattcatcgccaccagaaatcacacaaaggagggcaattggtaacagatttgatactggaatcaaagcgatagatggtttacttacctgcggcagagggcagcgtttgggtattttcgcggctgcaggtgcaggcaaaacatcgttgatgaatatgataatagcgcattctgatgctgatgtttgtgtcgtcgcgttggttggggagcggggacgagaagtcacagaattcattaatgaaatagctgattccccgcgccgagactcgaccatcctggtttatgctacctccgatagcccttcggtggagcgttgtaatgcagcgttgctggccacatcaatagcggaatattttcgtgatttgggaaagaatgtggtgttatttgttgattctatgacgcgttacgccagagcacttagggatattgcgctgtcagccggggagttgccagctcggcgcggttacccagcttctgtatttgagcaacttccttctttattagagcgaccaggcaacatgcaacaaggctccattacggctttctatacgatattgctagaaagcgaggaggagatagatcccattggtgatgagattcgctcaattctagatggtcatatttatcttaattatagattagccggacgcgggcattatcctgccattgatatattaaagagcgtaagccgtattttctcgaagatcacgactcctgagcattatcaggctgccacagatttacgggacatactagcccggttagatgacattcaattttatctggatttaggagagtatcagcgtggtgaaaatcaggaaaatgatcgagcattagatagaaaagagaaaatagaactgtttttaaaacagaagaccggtgcgaagagtctatttttagaaacacaaagagcgttgtatgaacttacttcttaaaaacaaaaattacttacgtttgcttgaaaaaaaactgaagcgttcccagattgaattgaactcaataaataagaaaataacatcagtgagtgagaaagttgaaagcatcgctacgcggatcgaaatcttagatatgcaagctggattattcgatcagaaaatgaagtttaccagagaggatttttttgataatcgccgccagaaatcaatagttttgaacgaaatattcttattaaaatataagatagaaacgttggatggagatttacagcagctaaagcagaacagaaatataatcaccaagcgagtcatgaattttaatataaagtgtgaaaagttccaaaaatatcttactgggttacgctgcaaccatagtttaaaatctgagacttcgagggaaattgaaatcgaggagctgtcggctcatggtggtattcgaatataaaataaatccggtattaaatattggacatcatgagacagtatcaattaatgatgctgtatccaggtcttttatcaccgattcggtgctagtttctgtggcaatgttacctgaggatgaaacgctcctcaataaaaagttaaatcaggttaaagcgccgtttctaaaagctagtttatctcttgatggtgaacagcaggagggtgggttgctgttagcacctttagttatcatagaagcgttattacacattaaacagggagtctcttttagtgctcagcctgaagtgaaagaaatacatgattcggcattaacatatttatttggccgtgagtttattcatatgagctcattcgcggggaataagggtgtgggcaaccaaagaagaatatcgagctctaaagttcttatcgctttatctgatatattgaagctcgaaagtactcatattgattcatctatgcccacggttcagcgtgaattacaacaatatcgcggtgaatatcattcgggagatataagcacgccaaatcagaattcaagtgagaagaatagagagatattgaccccatcgccacagaataaaggacctataggcggaatgataacgggtgatgccgagcaattattgttggagtcagaatgtctttctgggtctattggtttgagttggtcacgagaagttgatgcaacggatggttttttagataaggtaggtatgccagggttacagaaaatagatctaacgcctactttttacagtgataagacaggcacttttgatgacttttttgataatgaggtgagcaagtatatgccgttaccacctgagaacccagagaatgcatcgcgtgggttacattatcgattttcgtcttggagtgatactccttcggtcagaattcaactggcaaagatgcagagaatatttgcaacggcctctgatgataacgtgcagtatattttagatgaaaattatcatttgctggaaacagaacggactatgatctttgaaccacgtaaaacatatagagaaagaaaatttgattatggatattcggatcaggatgaaaaaccataatgtttaattttcggcgggttactcggcagcatgcgctaataataaaacagcagtttgactatgagccacaagtactgccggagacgatagcagccaataggacatatgcaattttccagcttcattgctctaaagaaagattaattggagcgatcgatcttgttgattggtgtcgatacatttggccagaactggctgggttggcctgggaatacatcggtgaacagcaactattagaattatttaaaaatgaagtaagggaaagaaaattattttctggggtttactcattacaagacattagtattttatctggagaaacaggacggaaatattggttgaaagttcgtgaatatcatgttggctggattttattatcgcgtgcaccaatttatttaataccaataaaaggcgaaactgagtcattaagacatttaccgataatgagtaaatggattctaggaaccagtaacatcagttatagactattaaatttattggaattgagagatgttcttctagtgcaacatattttgatggaacttaagatatcagataaggctatagcaacatttttatatcaggatcagggagcgattattgtggacacattagttgataacgaaggaaatactgaaaatgattttttggatgttttgaacgagaatccagacgaggaattaatcgcttttcctataaaaatgtccgaaatatcagttgttttaactttcgttcttggtaaaaagtcaataagtcttgatgaactgtcaaagattcaggcaggatttcagtttgaactagaacaagaaatggaaaagaaaataaaaatctacgcaaataatcatctgtttgctgaaggtgaattaatctatattgatgatgatttaggaattgaagtaacaaaaatggccactttaggcaagatagagtagataaaaatgcctgatgacatatcgcttattgcaataatagcaattgcttcactcttgccatttattatagcttccggaacctgttttttaaagatatcaattgttcttattatggtccgtaatgctatgggagtacaacaaatcccgtctaatattgcattgaacggaatcgcactacttctttctctctttgtgatgatgcccgtaatcagtgacatcaatgagtactcaaagacgcggaaagtaatagtaacagattcaatatcgattgaagaatttattgatggagggctagggaaatataaatattatttgaagaaatacgctgatcctgaattgatttcattttttgagtctgttcaactggggcgtagcgaggaagagattgatattgaaaacgaaggtgcatcgctattttcacttttaccggcttatgcactcagtgagataaagtctgcttttgaaattggtttttatatttacctgccttttgttgtgattgatttaattatctcaagcatactgttggcactaggtatgatgatgatgagtccggttacaatttctgttcctataaagcttattctattcgtggctatagatggatggtccctgatatctaaaggattaattatgcaatacatggaactttctcagcaatagcttatggaacagataatttatgcaagcaataaggcattgttactcatcgttattctatccgctattcctgtattggttgcgactatagttgggctatttgtcggattaatacagacggtaactcagctacaggagcaaactttgccttttggtttgaaattactagcagtattcggctcgttatttatgatgtcaggatggttagcagataaaataacgagttataccctagaggttttatctattgcgcttcaaccgctaacctaaatgttgtatgaataataatactattaacttatatatttctttatacgatacctttagctctggcatgataacgctcagtattgcctatttacgcattgctccagttttctttctcttgccttttttaaacactaaacttctaaatggaatagtgattaagaatagcctaattatttatataattttaggtctgtggccatatttatccgtaggtgatgatgtcagagagcagcgagaaattattgatattgtattatatgaactattaatcggcattatctttgcttttctaatttgcttacccttctttgtagctaatattatcggtgagataattgataatcagcgaggtgcgacaattagtgatacgattgatcctgctaatggcattgagtcatctgagttttctgcatttcttaattacttgatatgcatgattttcttagctgatggcggggtgtataaattagtcgcggcttttgctgatagttatcgcatgatgccattctgtcagggtttttctcattttgaaccactgataattggggcttggttaaattcattggtgagccaagggttgatactggcatcaccggttttggtgacattatttcttagtgaggttgcactggggctatattcacgtttttgcccgcaacttaatgccttttccctctctctagcgataaagtctattattgcatttagcgtttttttgctttatttccataatgaaataccgtcaatattagtatctatggtagacatgtctcttttattggatatttttacgcttaaataaattaagttatttttatttgaatttcgatgaagtatattttttatttgggaatagaatggcagagaagacagagaagcctactgacaaaaagatccgcgattcggcgaaaaaagggcagagctttaaaggaaaggatctggttgctgcagcggttttagtttgtggttccctggcaattagtgggttctcgagtcttgagaatataggtgaattgctacaaaaggtactactatcgccaaaagagattaacatacctgcctatctagatgagttgtatcgaatttttctctatgccgtagtgcctgttttgttattctgtttattgcctggggttttactttctttattacaaagtcgtttcaggctggcaacagaggcgttaaaaataaacttctcgcaccttaatccaatctctgggatgaaaaagatatttggcataaggccattaaaagaattagttaaggcaattttatatttgttgtctttctctacatcaatttatatattcatcatggtatggaaacgagatgtatttatgctttatcagtctcagctaagtgaaatgatagagcaatggtcatggctgtgcgttgtttttatttttttatttctctcgtcatcattaatattgttgcttctggatactttggctgagatttatctgtttattaaggatttaagaatggagaagcaagaagttaaaaaggaatataaagaaagtgaaggagatccaattataaaacatgcgcgaaaaacaatacatatggatattctgtcagaggaaacaaagcatagtataaaaagctctcaactcgtgatggctaatccaacacatattgcattaggtatttatttcgatccagaagtcgcagatttccctgttgtaatagttaaagcaaagaatgcagaagcgctcgcggttatcgcttttgccgaatcggaaggtattcctgttgtaagagatattattttagcacgcagaatctaccgtaatagtaatatttttagttttgtccgagacaatgacatgctggatgtaattaatattattatttggctaaaaagaatagaattagagaagatgggtatatatcttcctcctgcagaagagcttgttgaagaagtgaaatctgataccagtagtggaatcgatagtgatgattctaataacgttaataatcagtagagcaaatgtattatgatgactataaatgattataggttttttatggtttttataattatttctatatttcccaatcgttttttaaaagatagttagcgtaagtgtcgtctagactgaccttggtatatcagggctgtttggctatataacataaggagagcgcgatgagtgaatcaaagaatgtagaacaggctctgataaatactgccattactgaagatgagaaatatattgatgatgtctgtcaggcattgttggatggtataacatttaaagatatacatgatattcctgagtctacaatgcaaggaatctatgcatacgcttatgagttttatcatcaaggtaagttagacgaagcagaaacttttttcagattcctcagtatttatgatttttacaattctgattatgtcatgggattagcagcagtttatcaattaaaaaaacgctttgacaaagcaacagaattatatgcattggcatttatgctagcgaaagacgattaccgaccactatttcatgcagggcaatgcaacttgatgctaaaaaaaacttcggcggctttgcattgttttgagactacggtgattaatacgactaatgctgagttaaaacagaaggctcaggcttatttgtctgctctcaaacaaaacttggaagaaaatcgatcctgatgtacggggcagggacgataaatttatttaaaggaatatattatgactattgaccccagtaagcttaccagagaaagaattaatcatgctttatcttttgttgctgcgggagtggggccgggtgggttattgatcgcgaaagataatgccggcaaagaagttttggctcttgaggatgcctgtcgagaattagctgcagaggaacaattgagccggcaacgcaaaggtattaacggagccccgttgctaacgaaaccgcagcttatgacaaaggctcccttggcgagccggttgcagaatattgcccattctgataatcgtcctgctgagggtaatttaacgaaagaggctacgccattaaccacgggtaattacctaaatggcaatacggcattactgcaagccatgctcaacttacaggatattttccataaagataccatcggtaatatgcagaatcggctgaaacagctcaacgtcgaatctgaaacaattcaccttcaaggtcatgctttagtggcctcttttgaggaagtgaatattgagctgcgcgcggcaaaccaacgaacgaaaatgtatatagaagacgttgaaaaagaacgtcatttattaaatattttaaaagcgaagggcagttcggttgctcaaaacgcacgttctttaggctcacaacctgcatttagtgtagaaactggcccagtgcaaaagtatatagcggccttccccgaaactgtgggttctaatgcccaaactcccccttatccacaatctgaactgactcgtgtagataaggaaattgctacgcttcaagtacgtttggatgcaaaagagaaacaggccgcttgtgcagttactgatgctttggctatagcaaaaaaagcttccacctcgcatgaggaaatagaaaagtttcttacagaaattggtaatcgcgcacccggtagtatagataaggaaaagcatattagtgcgttaggacaactcgcgattctctctgctctgctgaaagagctgattggcaaattgaatcttgataatgcgttacgacaaaaggctattctggaaaagatagacgaaaccgcttgtcgtgatgcagaaaacaaagctaaagagtgtgaggcatcgcaaaaaaaagccgaagagaccagtaaggcggcatcctgcgctagtaaaattcttagttacgtgatgatcgctgtttcagttgttgccacggtcgctactctcggtgctgcgtctgcattaatggtttgtgttgcagcggtcggtattgctatggcggtggcagacgtagtgcttgaagcaacaggaaatagtagcttaatgcaaatgctagccaaagaaatcgccactggtataaccaatgccctgattgcctgtggcgtacccaaggaaaaagcggaggacattggtaaaattgttggcgttgtattggcggctgttgctttccttcttatttctctggtttcattgtcatcattcgtaaaaaatatggcatcgtctcttgctaaattaatcggtaatggtgtgctgaaagcaggtgcaaaattactgcccaaagccgcagcgcatgctgtagggaatacggctgggaaggtaggggatagtctgaatcaaggcattagccgtataggaaaggcaattaataactcagtaaatattggtgagacgactttgcgcaaggtagaaattggctccaaagtaacaggagctgctgtgaatgtgaataacgtagcgatatctggaacgctaaatattatttctgctgattataacttagacgcaaaaaatatatttgcagatttaacattaaatacagagtttattcgttcaataaacgaattgattcggcgcataatggagacactttcaacatttacgaaagtaggcgctgaacatttggacaatatgattgaagggatatatcaatctcaacaaaatcagttggccgtggttagacgtattgcgagctaattgtttcgtgatattacctgattattaaaacagtttaatctcgataaatggagttattatgagttcaaactttaatgtcaaatcccaagcgcctgtttatcatcctgcgataaactccgatcaaaaaaatagtccaataaattctagtgaatcagctgagggaacaataaatagtttaaatttaaactcgttatctggattacaagatggatcattaaaacttccaaactcgggagtgactcttgtatcccctcagaaagaaatcgatgaaagtgttttagctggtttatccaaaaatttgaatgaattcatgcaattgtattctaagaatgctcctcataaaagatattcgccaaactcagagttacaacagacccagtcagattattttacaaacgtactcgcacctgagtttctacataaaatttctggagccttgattgcacgcgagattggtgtagatagagtctcccactttgatgggtttacttcagataatttaatgatattcatcagatctatgatacagcgacaacggatgactgcggatgaaagtaacgccaagataaacatcttcctagcttcgctaagcgctacaatggctgaaaatgcagcagattcaacaataaaagagggcaagcagcaactgatcggggccatattcagctttgttatcggttctgtcatggtgggcgccggtagcggtatacagctacgtggcttaaataagcaaaataggatgctgaatgcagaagttgaacagcagcagccgaatattgctactaataaagttggtgacgtcaggcagagccttaatgttatggattcaagaggtgccagcatgaatgcggttggcacaatgaaaaataataaaataggaacgctaaatgaaccaagagaaaggatgtcttccaaagaaatacataatcatcccaaagataagatacaaataaaagcagagcgagaacgaccccaagatcttaattcatcgttgagtacggccaagccaaaccgccatactgggcgtaaattggagatagttggcatggctatttctaatatggcgactactggtggtcagatggtttcgggtatcaacatggcggaagttaaaactattgaagccaacaagatgatacaaaacactgccgcagatataactcaaactattttaagagaaaaagaaagagccgctagctctcttaatgatatgtttaaaagcatgcaggacactattaacgggataatcgctggtcaaaatatgacatctgcaaaaattattcgtggctaagatatttaaattaaggaatcatagttatgataatatctacagtgaacgcattgccgatcaagcagaattctagtcagattgaatcgttacattctacgttgaatggtgggggaggcgatgttatcaatagcgacttttttgattctattatatcacgttaccaagatggtaataatcatccgaatttaataagtgattggttaagtttattggcgagtgacaatgatggggtaagaagattgatcgcggtggaaaaaacgggtgtaacgaaaggagatactcaacgtgtcattaaccgtgtgtcagatgatattcatgataaatatgaaatattatcttcaaaatataatcatgatgaaataaatatacctccacatataaaaagtttgattgaagttgtagatattggttatgaagattttcagagtaagcataaagaaatagttgagagatatagtaagtattacgaagcttttagtgagggactcagtgcgcagtcaaaatatgttggggctgggagtgatgcaaataaaattgattttaaaaaacggagttttgccgctagtctaaacgataaacttattatctatagtcatgaaccgagtttttatgatgcagaaactggcaaaataaatgaaaatgctttttcaaatgtaaaaacactttatacgttaacgggtgatgaaaaaagatttaattactggaagaaggaactgtcacctgaattaaatgtaacttgggataaagagaaaggatatatttatgttttacctaatctggataatttaaagagtatatttaaaagtcttgagaattctgatggggtaataataaataaccttagtggaaatgatgacatcgctaccgcaacttatcaagcatggcaggcagggaacgacagtataaagaaccggcagcaaaatgctcttaaccagcttacggagaaatatggtcatcatctcaataagttggaaaacttaattcagttcttgattagagctatagaagatcacgccaaatccaatgaaccaacgttaagaattctagcgtagcaaagggatattatgtctgacacaaataggttcgccaacactcacgatgttttatacgttggtatattacaatggttgcagaaaagtcttgttacgataactaattgtcctctgtcgaaaataaatccggatgccagactaatactggatttgcatatagactctctagaaatattagagttggttattgaggtagagaaagaaacggctaagccgttagctgatgatgtttggcataaatggaatacgataaatgatatcgtagaatatataaaactgacgaagataaggtgagtgtatattctgcattcgatgtaatttaaaatatcgtcattataaaacccgaatcagtatattaaactttaataagcaggttgtggttttacgcggctggtttctattctaatatgatgaatccatctttttacgatgagttaatcaatgctatcagttaaatatccgttgctcctgctattaccactattgctcgttaatgggtgtcagcggccaacaaatagggctccagtagtggagacaccacagcagattgaacagctatctgcactgatttctggtgccatgtatttgcgacaggaatgccaaaggaaagatattcctgatgaatcaatacttatgcaaacggcggtaaaactggcaatggagcgaaattgggataccaaagcaccagcttatcaagcgctgaaagggaaaagtcaggcacgttatcaggctcttgtggaagaaattggcaccgataataatcaatgtccttctcttaacctgctactggctgattttgcctatgaagctcggcgtaacatgaaatgacagtatgttatcttcattaattgcatggtaatgatgcagaaacaatagccaacctgcgagagctaggaaagggccgaaaggtaaaggtgcacttaacggcctatttctaagcaaatgcgcgatgaaagtaaaactgctcccagcgagggaagcaatcaaaagcagggccggtagctccatccagccgagccaggctcctaaggccgctagtaatttaaagtcgccatagcctagggcttcacggtgcgttgtcagccaaaatgcccagtaaaggcaccataagactaaatatccacccactgcaccgataacggcatcacttagtgccaacgtttgatcgaataaatggaaaatcaagccaccccatagcaaagaaagcgtgaggttatccggcaatagcaaatgctcaatatcaattgcggttaacgctattaatacccatgtaaagactaatgcagcaagaagcgtatatccggcaggaataatcatgctgataaataatgttaaagccacagtcgctagctcgatcatgggataacggagagagatcttattttggcagtgtcggcattgtgccttaagtagaaaccagctgaatatagggatgttatcatgccatttcagtgagtgatgacaatgtgggcaatacgagcgaggtatacacaagttgaattcatggtgcttattattcttgagcataattggtagtcgatgaatgacgacattaagaaaactaccgatacataggccaagtattactagactaccccaccatagtggagtaaaggtttgtaagctataaagcatatctaacataagtgaaatactctaatgtcgtggattaataaatttggtgtatatctgtatgggctgataaataaaatacagaaataacaaaggcaccattagcgatttaatgcatataaattattctaattgctgatgcctttctcttatttttgactcaaatgtcattaattagttattgggtggcgacaggcttatttgtatagaagttaagataaatgtgagtattcatactatgtatgatagctagaggaatttagttctatggtgccaaattgaaaatattatgatatgtgatgaggtaattaatattattgcgggtatagttattaatatactgtgtttttttagaaaaagttgatttttactatggtaaagttaattgaaaacatgtcaattagtatgctaatagttaatatttagagtaaatatttgttggtttttatcaataaaatatttttatgaataaggctgatgatagctaaaaatttttttgtttcgttaccgtaaaataaagcccgacagatttctgccgggcgataatagtcaatctacctgtggctaatcattagccgcagcgattacatttagatgtttgaataatctggaagaaatcattgcctttatcatcgaccagaataaaagcagggaaatcttcaacttcaattttccagatggcttccatgcctaactctggatactccacacattccagacttttaatactgttttgcgccaataccgccgctggaccaccaatactgccgaggtagaagccgccgtgcttatggcaggcttccgttacctgtttactgcggttgcctttggcgagcatgatcatactgccgccgtgggattgcagtagatccacataggaatccattcggcctgcggtggttggtcctagggaaccagaggcataaccttccggtgtttttgcagggcctgcgtaatagatcgggtgatctttgacatattgcggcaatccctctccatttttcagacgttcttctaattttgcgtgggcaatatcacggccaacaataattgtgccgctcagagataggcgcgtagataccggatactgtgacagctcttttaggatctctttcatcggccggttcagatcgatttttacgactttaccttccgtggcctgacgtaaatgctcggggatatattgccctgggttatgttccagtttttccagccagatgcccttacggttaattttgcctttaatattgcgatcggcggaacaagaaacccccattcctaccgggcaagatgcgccgtggcgtggcaagcggattacacgtacatcatgggcaaaatatttgccaccgaactgcgcgcctaaccctaattcctgagcttctttcagtaattcttcttccagttgaatatcgcggaaagcttgcccatgctcgttaccttcggttggcaaaccatcgtaatatttggtggaagccagttttaccgtcttcagcgtgctttccgcagaggtgccgccgatgacaaacgcgatatggtatggcgggcaggcggcggtacccaaagtgcgcattttctcaactaggaaggctttgagtttgccgggagataatagcgctttagtttcctgatacagataggttttgttcgctgaacccccacccttggtgacgaacaggaatttataatcttccccttctgtgctgtacaggtcgatttgcgcaggcagattgctgccggtattgacctctttatacatgtccagcgcggcgttttgcgagtaacgtaagttatcttcaataaaggtgttgtataccccacgggacaaggcttctgcatcattaccgccggtccagacgcgttggccttttttccctacgataatcgctgtgccggtatcttgacaggttggcaaaatacctttggctgcgatttccgagttacgcaggaattgcagagcaacatacttatcgttttcactggcttcaggatcgtcaagaattgcggcgacttgcttttgatgggcagggcggagtaaaaacgatgcatcgtggaaagcttgttgggcgagtaaggtgagggcttctggttcgactttgagaatatcatgatcttcaaactgcgagacggagacatgattattgctgaccagataatactcggtatcatcttcctttaaagggaaggggtcttgatagtggaacggtttattagacattttctctcacttgcaacatcagttatcgaaactaaggtagatcaagccggtatattttttttaagtagcctttggctccgatcctactatatgtggcgtcagctaagcgatgacgccatctcttttataggggatagatcgcattttccgtatgtatctatgacgtaaccagaaataatctgtcgttgctttaaatcacagtggattatttcttatttttgaaaaaagtcattacaccgccgacaaccaaccccagcacaataccggtcaaaatccactcggttaatgtcatttacatttccttttttattaatttgcaggtgttatttttaaatttttattggttttgtttgcctctcatcagcaataaaccaataaaaatagcctgccgtaacaggctttttaaacgatgttaaggatgctgtgtctggacggtttctacgccatccggttctaccgcctctaacggaggcataatatcttgaatcatctgctcgtcaaaactagggttaagagccggtgaaaggggagaactgaccagactatcgggtattgcaatatgaggcacaggtgcgtcattcacaaagtctgattcatcctgtttcaccgtgcgactgagagaaaccagcgccacgccgcataaagcaaagaaagcatatagaatattgccccctaaaggcgcaatcagcgcaccgaccgccagtgggccgatgctggctcctacgccaaatgacatcagtaaacaggctgccagagagacgcgtctttcaggttcaatcagatcgttagccagcgcgacgactaatgggtaaagggtaaattgcaacatgctaacgatgaatcctagccctagtaacagacgaaaaggaatatgcggccagatagccagcggcagcgcggtaacggcaagtaatatggcattgatacgaatcaataaggttcggttataacgatcggataaccagctcaagggaagctgagccaccagtccagcaaaaattgacagtgccatgaacagacccgtttgctcggttgtcagcgattgcaggctggaataaaccggagcaagcccgtaaaaagaaccgacaatcatgccaataaccaaggttgaggctagaattttcgggatagaatggataaagaatttcaattccattggtgctggtgacatttgctgggcattactacgggttgtcaatgcgataggaaccaggcaaagagcgaagaataaagcgatcaccatcaatgtgctgaggcccaaattgggctgtagcatcagaactacctggcctagcgccataccggcgtaggtagctgccatataaaaaccgaataccgtaccacgttgattcgaggatgactgatcgttcagccagctttctagtaccataaactggcacatcatacacaggccgataattagccttagtatgacccatacgggtatatattctgttaatccgtggctcaatactgccgcggtaatgataccggcgcaggcgacataggcgcgaatatgcccgactctggcgataagaaaatgaccgaccttaccgccgataactaatccgatgtagttagcggcaataatggccccaatcagggctccggacacgttaatagatgttaaacgcagtgagatataggtcgtcagcaggccagaacccaacaacatgagcaccgtcgcggtgtaaagtgggaagaatgcgttcagaatttttttcactatagcgtcctggttttttatcctgaaatgatcgtcggcgtacaggcctaaaagtcggacgtaaaaacagtcagataaagaaattacgtcacgccagcctgctcgggtattacctctctgcaatcaattagatgatttataagcttctttgatattaccagctaagcatgataggtaaagcgttgtccggacaagggctttgaattcgacatgcgaaacgcttcgcatctattggcagaagtgcagcacaaacgaagagaagtgctactatcgccactgaaatattttcatagaataagggggcatgatgaacgaacaacaactgcgtcagctcagcattgacgccggtgagttgctcaaggctcgcggggccagcgtgacctgcgctgaatcttgcaccggcggatggatagcgaaagccttgacggatatcgccggtagctcggcttatttcgatcgcggatttgtgacttacagtaatgaagcaaaacacgatttgctcggcgtagcggaaaccaccctgaatgcgcatggtgcagtcagcgaagaggtcgtgcgtgagatggccgtgggggcattacacgcggcgcaggctgattttgcactctccgttagtgggattgcagggcctgacggcggtactgaatttaagcccgtaggtaccgtctggttcggttttgcaacaaaggctggacagatctcggctgagaagcatgtttttaatggtaatcgcgatgagatacgcttgcaggccactattttcgcgcttcagacgctggttgataaatttctaaaaaaataggcttgatactgtatgattgtacagtataattagcgctaatttcctgcacaaaacaacattcagtggcgacgataagggcgaccttaccttgccagagagggagtaaaaatggctattgatgagaacaaacaaaaggcattagcagcagcactgggccagattgaaaaacaattcggcaaaggcgctattatgcgtcttggcgaagaccgctcaatggatgttgaaacgatttctaccggctcattatcattagatatcgctctgggagccggcggtttgcctatggggcgtattgttgagatctatggccctgaatcgtcaggtaaaactacgctgacgctgcaggtcatcgccgcagcgcagcgcgaaggtaaaacctgtgcctttattgatgccgagcacgcccttgacccaatttacgcgaaaaaactaggcgtagatatcgataatcttctgtgttctcagccagataccggtgagcaagcgttggaaatctgcgatgcgttgactcgttcaggtgcggttgatgtgatcatcgttgactccgtagccgctctgacgccaaaagctgaaattgaaggtgaaattggcgattctcacatgggtcttgctgctcgtatgatgagccaggctatgcgtaagctggcgggtaacctgaaaaatgccaacactttgctgatctttatcaaccagattcgtatgaaaattggtgtgatgttcggtaacccggaaaccactaccggtggtaacgccctgaagttctatgcttccgttcgtttggatattcgccgcatcggtgcggtgaaagaaggcgatgtggtagtgggcagcgaaactcgtgtcaaagtggttaaaaacaaaattgctgcgccgttcaaacaggctgaattccagattctttacggtgaaggcattaacatcaacggtgagttggtggatctgggtgttaaacataagctgattgagaaagccggtgcatggtatagctacaacggtgacaaaatcggtcaaggtaaagctaacgccagtaattatttgaaagaaaacccagctattgcaacagagatcgataagaagctgcgtgaaatgttgctgagcggtgctggtgaacaatcgactgcggcagccggtggttttgccgatgaagccaacgatgagactagcgaagaattttaataggctgaagtgatagccgtatagtcatattaatcctatgacctggcaaaatatcaacccgataagttttgtattgcggtaacgcagcaattagaccaattctggactgagttaactcagtttctggaagcggtgagaatgttagcgctgtcactgccgcaactcgaaatgtaaggggatgggattctctacttgtgattaaaagtaatgaatgacctgttaagccgcgcgatgagattgctctctcaacgagatcatagtgagaccgaactgcgccgcaaacttgcggcgcagtcattttcggtaaaaggcaattggggacgcggaaagaaaaaatccccatctaccactaaacggggtcaaagcctgaataacggcggtggcgataatcacgacgatcgaagcgctaaaaatagcttttatcatcacagctatagttctggtggtagccgcaacgaagaaaaagaggctgacaacgatctccatgatctcactgacggtcatgacgcggctgaggctattgacccaaaagctattgatgaagtcattgcttattgctatcaacacaactggctggatgatgctcgttttgctaccagttatatcaacagccgtagccgcaaagggtatggtgttcagcgcattcgctctgaactgttgcagaaaggcatagaaaaagaacaagcacaaactgcttttgaaataagtgagatcgactggtgtcagctggcaaaagaagtcgctcagcgcaaattcggtgaaaccttacctgttgaatggaaggaaaaggcaaaagttcagcgttatctcctctatcgtggcttctttcaagaagaaattcagtcgatttacaatgattttatcgaatgaatgcacacgggattttacttccctctgaagaaaatttatcttattcccactttttgtttgtgagctgactggtagtcccctttattaaggggggcgctgttggctcgcgagccattcttttagcttgattccgggacaattatgagcaagagcaccgctgagatccgtcaagcgtttctcgatttcttccatagcaagggacaccaggttgtatcaagcagctcattggtccctaataatgacccgacattgttgtttaccaatgccgggatgaaccagttcaaagatgttttcttgggcttggacaagcgggcctatactcgcgccacgacttcccaacgctgtgttcgcgccggtggtaagcataacgatctggaaaacgtcggttataccgcacgtcatcacacgttctttgaaatgttgggtaacttcagctttggcgattacttcaaacatgatgcgattaacttcgcatgggaactgctgaccagcgaaaaatggttcaacctgccgaaagaaaaactgtgggttaccgtttacgaaaccgatgacgaagcctataacatttgggcaaatgacgttggcgtaccgcgtgaacgtatcatccgtatcggcgacaaaggcgcgccttttgcctcggataacttctggcaaatgggtgacaccggcccgtgcggcccgtgcagcgagatcttctacgatcacggcgaccatatctggggtggccctccaggctcaccagaagaagatggcgatcgctacatcgagatctggaacatcgttttcatgcaattcaaccgtcagtcagatggcacaatgttgccgctgcctaaaccatccgtagataccggtatggggttggagcgtattgccgctgtattgcagcacgtgaatactaactatgaaatcgatttgttccgcgatttgattgcggccgttgccgaagtaactggcgctaccgatcttaatagcaaatcactgcgcgtgattgccgatcatatccgctcatgtgcgttcctgatttcagacggtgttattccttcgaatgaaaaccgtggttatgtgctgcgtcgcatcattcgtcgtgctattcgccatggaaatattctgggtgccaaagataccttcttctacaaactggtagcgccattgattgccgttatgggttcagccgctgatgaattgaaacagcagcaggcgatggttgagcaggttctgaaaactgaagaagagcagtttgcacggactctggaacgtggtctggcattgctggatgaagagttgaacaagctgaccggcgacacgctggacggtgaaactgcattccgtctgtatgatacttatggtttcccggttgatttgaccgcggacgtgtgccgtgagcgcaatctgaaggttgatgaggctggttttgagcaggcaatggaagctcaacgccgtcgtgctcgtgaatccagcggttttggtgctgactataacagcctgatccgcgtcgataccgcgagtgaattctctggctatgaccatgtagagcagaaatctaccgttactgcattgttccgcaatggtgaagccgttgacgagattcatgccggtgaagatgccgtggtgatcttgaatcagactccgttctacggtgagtcaggcggtcaggttggcgaccaaggccaactgaaaagcgctatggctgattttatggtctccgacacgcagaaatacggccaggcgattggccacttaggccagttatctcaaggtactttgcgtattaacgatagcgttgatgctattgtagatagcgctcgccgtaatcgtattcgtctgaaccattccgcgacccacttgttgcacgctgcattgcgtaaaatactgggtgagcatgtggctcagaaaggctcattggttaacgataaatacctgcgttttgacttctctcattttgaagccatgaagccggaacaaattcgtcaggttgaagacctggtgaatgcgcagattcgccgcaacctgccaattcaaacggaagttatggagttggacgcagcgaaagaaaaaggcgcaatggctctgttcggcgagaaatatgacgatcaggtgcgcgtattgaccatgggcgacttctcaaccgaactttgcggcggtattcacgccaatcgtaccggtgatattggtctgttccgtattctggctgaatcaggcacggcagcaggtattcgtcgtatcgaagccgtaacgggggaaggtgctattgccttgctgcatcagcaaagtgatctgttacaggatgttgctcacctggtgaagggggatagcaataatctgacagataagattcgggccgtattggatcgcagcaaagcgttggaaagagaattacagcagttgaaagaccagcaggcagcgcaggagagtgcttcattgtcctcctctgcgaaagaagtgaagggcgtaaaactgttggttagcaaactggataacgttgaagcgaaaatgctgcgtaccatggttgacgatctgaagaatcagttgggctctgccattattgttctggcaacgaccgcggacgataaagtgagcctgattgtaggcgtgaccaaagatttgaccaaccgagtcaaagcaggtgagttgattgccgatattgcccagcaggtggggggtaaaggcggtggacgccctgatatggctcaggctggaggttcggatgttcaggctctgcccgccgcgctggctagcgtagaagcgtgggtcgcgtctcggctgtaagcatgcaatgatcgtgtaaaataaatgcgccatacctcaaagaagagtatggcgcttttcaattttcttgtcataggtcggttacaaagttaaacgcaaatttgttcgtgtcgtctaaacttgtattagttagaggcgcgaccaagctacttacattttatgtgggggcgatggcttacgttttcacggtgtatgatggataatggcggggaaactgagagacccgactcttttaatttttcaaggagcaaagaatgcttattctgactcgtcgagttggtgaaacactcatgattggcgatgaggttacggttactgtattaggagttaaaggcaaccaggttcgaattggtgtgaatgctccgaaagaagtttctgttcaccgtgaagaaatctaccaacgtattcaagcagagaagtctcaaccgacgacttactgatattgaagcagcgtctcgtggaatgcgagacgctgctgctctcccccaaattctattccctgcatcatttctcactcgctcatggctattttctcgcttttctcccaagatttaactcgcctcagtaatattccttcaattcttttacaacgctatttcgcagacatccttatctcgcctgttgataaaatactcttttcgatgccaaattgcgcatcttggctgtgaattgtgcaagtaaacgtttgttgggaaaaattgtttgacttataagtgcaggaaagtaatatgtgcgccacgcagtgccgatgagcttctttaaaagcaagttaggcacaattcgaaagaagcgtatggtgaggtggccgagaggctgaaggcgctcccctgctaagggagtatacggtcaaaagctgtatcgagggttcgaatccctccctcaccgccatttactatgcacccatagctcagctggatagagtactcggctacgaaccgagcggtcggaagttcgaatcttcctgggtgcaccatattttgcagtatggtgaagtagttaaatgactgtcagatagtttcagagatttatttgcacccatagctcagctggatagagtactcggctacgaaccgagcggtcggaagttcgaatcttcctgggtgcaccatctttgttgttatagtttcactcggtgaaacgcttcgcagtaaaaaatcaaacgcacccatagctcagctggatagagtactcggctacgaaccgagcggtcggaagttcgaatcttcctgggtgcaccattttaagaaacctcgctgcggcggggttttctgctttctggctatttgaaatagcatcctgcctgatttggtcagtgagaccccgcgagtgccagtagaacgccactgacttctttttttccgctatctgaatttcgcctgcctatgaaaaatatcaagatgggtcgatgaggttataaatattcatcaaatctatatctcatcacagtgcttgtactggctaatgaattcccatccagttgattttattacgctcatctaatgaccatctttagccaaaaaacactttttctgattaaatacagatggttatacagtaagcgacaatttaatgagtttgcgataaagtagcttttcctttcctcaatgatcctgggataaagatgtacgatcgctatgaaggcctaatctttgatatggatggtacgattttggataccgaatccacccatcgacaggcttggcggaaggtgttgatgcctcacggtattcaatttgatgagcaagctatggtggcgctcaacggctctccaacctggcgaattgccgagatgattattcataatcatcggttgaagttagatcctcatctgttagccgctgagaaaacggcagcggtgaaggcgatgctgttggataacgtaaagccgctcccgctcattgacgtggttaaggcttatcatggccgcagacctatggctgtgggaaccggaagcgagcacagcatggctgaggcgcttttacgacatcttggccttcgggattacttcgatgtcatcgtcggtgccgatgacgttacccggcataagccggagccagacacctttttgcgctgtgccgaattgctcggcgtggcgccggagcgctgtgtcgtgttcgaagatgctgatttcggcgtagaagcggcaaagcgggcgaagatggacgtggtggatgtgcgtctgctgtgagtagcacgctggctgtagcatcgttattcggtagcagttttcttagcgcgacgctcttacctggaagttccgaaattctattagtgaccttgctaactgcgggcagtgcgcctgcggtgatattagtgttatctgcaaccgtaggtaatacgctgggtggcttaacaaatgtagttataggccgcctgttaccggcgttaaaaccgcagcgcgggctggatatgacgttgggctggctccaacgctttggtccagccgctctcttgctgagttggttaccggtggtaggcgatttgatgtgtgtgttggcaggctggctgcgtatgccctgggctctggtggttttttttctgtgtgtgggaaaagctgtgcgttacatcgttattaccgtgttaacgctggaaggaatcgcctggtggcaataaagatgtgatgacttcacatagtcacattgacgtagtttcagtatgcttacgggctatggtttttaagagcgggaggtcgatttgatcccggacgtatcacaggcgctttcttggttggaagcgcatcctaatgcattaaaaggaatccgccgcggcattgagcgggaaacattgcgtgtgaccgctgatggccaactggctgcgacgggtcaccctgagtcactcggggcggcgttgacacatcaatggatcacgactgattttgccgaagctttgctggagtttatcactccggtagacggcgatatcgatcatttgctggcttttttgcgtgatattcatcgttacactgcgcgtaaacttggcgatgagcgcatgtggccccttagcatgccgtgctttatcggcgccgagcaggatatcgaactggctaaatacggttcctccaacgttggacgcttcaagacgctgtaccgtgaagggttgaaaaaccgctatggcgcgctgatgcaaaccatttccggcgtacattacaacttctcactgcctattgagttttggcaggcgtgggcgggtgtggaagacgagcaaagtggtaaagaagagatctctgccggttatttccgactgatccgtaactactatcgctttggctgggtgattccgtatctgtttggtgcttcgccagcgatttgctcttcattcctgcaaggacgtgagaccgcattgccttttgagcgcaatgataacggtatgtgctatttaccttatgccacttctttacgcctgagcgatttgggttacaccaataaatcacagagtaatttaggcattacttttaatgacctgaatacctatattgatggattgaagcgtgctatccatacgccatcggaagagtatgcggcgctggggctgaaagagggcgatcgctacctacagctcaatagcaatgtactgcaaatcgaaaatgagctgtatgctccgattcgacccaaacgcgtcactcaatcaggtgagtcaccttctgacgcgttgctgcgcggcgggatcgaatatatcgaagtgcgctcgctggatatcaatccgttctccccaattggtgttgatgcggtacaggctcgtttcctcgatctatttctgatctggtgcgtgctggctgatgcgcctgaaatgagcagcgatgagctactttgtacgcgtaaaaactggaatcgtgtgattctggaagggcgtaaaccgggtcagactattggtattggctgcgatagcactcgtgagcctttagataaagtcggtaaagcgctgtttgacgacttgcgccgggtggcagaagtgctggacggcaaagacagtcgggcttatcaggatgtatgtgatgagctagttgcttccttcgataatccggaactgacgttctctgctcgtattttacaggcaatgaaagcggaaggaatcggtggtgtcgggctggatctggctgaacgttatcgcgaaatgttacgcagtgagccgttggaaatattgactgaagaacagctttcagctgaacgtgaccgttcttggattcgtcaaggtgagctggaacgtagtgatgaactaagctttgaagagtatctggcgatacacgcaggtcgctagaaaaagaaaaggccacaatcaatgtggccaaattaacatctctgtatacagggatgatgataacaaatgcgcgtctttcacatattaagacggcggtgatttaaaaaagtttcattgggttcgaaaaaaaattcttctgcgagaaataattttttttgaggaggtaacaagatgccattattggacagttttacagttgaccacaccattatgaaagcaccggccgttcgcgttgctaagacgatgaaaacccctcacggcgatgcaatcaccgtgtttgatttacgtttctgcgtgccgaataaagaagttttgccggagaaaggtattcatacgctggagcatttattcgcaggttttatgcgtgatcatctgaatggtcagggtgtggaaattattgatatctcaccaatgggctgccgtaccggtttctatatgagcctgattggcacacctgacgagcagcgtgtggcggaagcgtggaaagcggcgatggctgatgtactgaaagtcactgaccagcgtaaaattcctgagctgaatgaatatcagtgtgggacttaccaaatgcattcgctggaagaagcgcaggacattgccaaaagcatcatcgagcgtggtgtgcgggtaaatcataacgatgagttggcattaccgaaagagaaactgactgaactgcacatctagcatcgttgatatgttggaaaataaatatcctccggcatagccggaggtttttcatatgcgcctataaggctctgttgccagccgcgccctaacaggcgcatcgcgatctgacatttgcatttatggattacttacggcccgtaaacgggctgcccggataggggatcgagagttgctcacccattttatcctcttccaactggtgctttatgtattcttgtatcctggctgtatttttcccaaccgtatcaacgtaataccctcgacaccagaactccctgttacggtatttgaacttcaaatcgccaaactgctcataaagcatcaggctgctctttcctttcaggtatcccataaaacccgacacactcattttgggcgggatttccagaagcatatggatgtgatccacacagcattctgcttccagaatattcacgtttttccattcgcacagctttcttaagatactgcctatcgctttgcgcttttccccgtagaacacctttcttcggtacttcggcgcaaaaaccatgtgatatctacagttccatcgcgtgtgcgctaagctcttttcgtccctcatagggacccccttttgatttcttgttgaacatttgcagttgccagaccgcaaactgttttaacaaatcaaaggggtttttataactggctcaaagctgaaagctttaccgaacctccagcctggctggaggttttctgtgcacaacaaaaaaagacgcgagagcgtcttttttattgggcgcgtatttatcgcgcgcgagttgctcgatctgcggctattactgcggattaagcggtgaatgcggatgatcgatcggggtaactctgacctgtttaatcatattgtcctgtacgtccaatacttcgatttcgtaatggccgatgcgcacttgagcgttaatctcaggaatatcttctagggtttcaagcagcatgccattaatggtgcgggcgtcgaccggcagcgaccagttaaaggccttattcagttcccggacattggcggtgccgtcgataattaccgagccatcgctttgtggattcacttcttccgccaacgtaggggacattgacgtagtgaaatctccgacaatctcttccagaatatcttctaccgtaaccagtccttgaatatcgccgtattcatcgacaatcatgccgactttttctttattgcgctggaatttgaccagttgaacgttcagcggtgtgccttctggaataaagtagatttcatccgccgcgcgcagcaggttttctttgttgaactcttttttctcggtcatcagccggtaggcttcacgcactcgtagcatcccaatcgcgtcatccagcgattggcgatacagcacaattcgaccgtgaggggaatgagttaactggcgcataatggacttccaatcatcattgatatcaataccaaccacttcattgcgcggcaccataatgtcgctgactgtgactttttccagatccagcaccgagatcaacatgtcctgattacgacgggaaatttgtgagtgtgattcattcacgatactgcgtaattcgtctttactcactgcatcactgacgtgcacattgcctttgataccgcacaggcgcatcaacaggcgggtaatgctgttcagtaaccagaccagcggcagcatgatcttctgcaaaggagccaatagcatgctgctagggaaggcgacgcgctctggatagagcgcagcgatggttttcggcatcacttcagcaaaaatcagcaccacaaaggtcaatacgccagtggcaactgccacgcctgcgttaccgtacagtcgaattccaactatggtggccagcgccgatgcgagaatgttaaccagattattgccgataagaaccaggctaatcagacgatccgggcggcgtaatagtttttccacgcggcgggcagaacggtttccttgcttggccaaatggcgcaggcggtagcggtttagcgtcatcatgccggtttctgaggcggagaagtaagccgataccacgaccataatgatcagaatgatgataagtgtactggtagagacctggtccaacgcaatattccttatagcgatagatgaaggctccagtcagggtaacaggagccataggttgggcgggggagtgtcgttagccgatcatgatctcttgcagcaggcggctgccgaaataggctagagtcagtaagaatgctccggcaaagctgaaccagaccacgcggcggccgcgccacccttcgtgataatgaccccacaatagaataatgtagacaaaccacgccataatcgacagcacggctttatggacattctctttgctgaacaaattatccatatataacaaaccggtgcagagcgttagcgtcagcagcactacgccaatttgcgtaatgtgaaacatttttcgctcaatgctcatcagtggcggcatatcggcggtgaatgtcagttttttattcttcagtagataatccagccaagctagctgcatggcgtacaatgcggcaataatcagcgtggcataacccaatagcgccagcccaatatggataaataacgccgggctgccttccagatgggtaatgaattcgcctggcatcagactggcgagagccaaattgatcatggcaaagctgtaaacgattggcagcaggaaccagccgcgcccacgagaggccacgaatgtcatgattgagcagatcatcaaaccgacaatagagccgatattcagcaaagtcaggttttgaccctcgccaacatcaaatatttgatgtttcaatgcgataccatggcaaaccagcgctactacggcagaaaccagggctagccgtcggtaagcgctgctcttcctcaccaaactgggaataatcagtcccagactaagtaaataggcaactagagccaaaatagagaacacgggcatagcggttaataggcatcggctgagtgaattggataaccagtataacgttagcagcgtcatgctccaaccgttctcctacgtgaaggcagagatcgcgcgcgcttcgtgttataatcccgccattgtgtcgcccgggcggcctgtttccacgttgagcatgagacgatgtttgagaacttaaccgatcgattatcgcgcacactgcgcaatatcagcggccgtggccggctgacagaagaaaatattaaagaaaccctgcgtgaagtccgcatggcattgcttgaggccgacgttgccttgccggtggttcgtgactttatcaaccgggttaaagagcgtgcggttggccatgaggtcaataaaagccttacgccgggccaagaatttgtaaaaattgttaagaatgagctgatcggcgccatgggcgagatcaataacgaactcaatctggcagcccaaccgccggcggtcgttttgatggccggtctgcaaggggcaggtaaaacaaccagcgtagctaagctgggtaagttcctgagagaaaagcagaagaaaaaagtgctggtggtttctgccgacgtttatcgccctgcggcgatcaaacagttggaaacgctggcgcagcaggttggcgttgaattcttcccgtcggacgtgcaggaaaaaccgattgatatcgttaatcgggctttacagcaggcgaaactgaaattctttgatgtgctgatcgtcgatactgccggtcgtttgcacgttgatgaagccatgatggacgaaatcaaacagattcatgccgcgattaatccggtagaaacgctgtttgttgtcgatgccatgaccggtcaggatgctgccaacacggcgaaagcgtttaacgaagcgctgccgttgaccggcgtggtgttgaccaaggtagacggcgatgctcgtggcggtgccgcgctgtcgattcgtcatatcaccggtaagccgattaaattcctcggtgtgggtgagaaaaccgaagcgttggagccattccatccggaccgcgttgcttcacgtattctggggatgggcgacgttctctccctgatcgaagacattgaaagcaaagttgaccgtgcacaggcggaaaaattagcgaccaagctgaagaaaggcgacgggtttgacctgaacgactttctggatcagttaaaacaaatgcgcaatatgggtggcatggccagcatgttgagcaagatgcccggtgcaggccagttgcctgacaacgtgaaatcgcaaatggatgacaaagtgacggtgcggatggaagccatcatcaactcgatgacgctgaaagaacgtgccaagccggaaatcatcaaaggttctcgcaagcgccgtatcgcagcgggttccggtatgcaggttcaggatgtgaaccgcctgctgaaacagttcgatgaaatgcagcgcatgatgaagaaaatgaaaaacggcggtctggccaaaatgatgcgtggcatgaaaggtatgatgccaccgggtttccctggccgttaatgccctcatttgccctgataagcattcaggcgaaaagggttatcaatttcccgccagaaacggcggtaaacgatgaaaattggcctcattataaaagtagcggacaggaatctacgctttagattgctttttgcgccaaaatgagtaaaattttcgggctttttatattgcaactgaaccccgttccccgatggggttcagttgttttattaactaaagaggatgttatggtaacaattcgtttggctcgtggcggcgctaaaaagcgtccgttctatcaagtagtagtgaccgacagccgtaatgctcgtgacggtcgtttcatcgaacgtgtaggcttctttaacccgatcgcatctggtcaggctgaagcactgcgtttggacctggatcgtatcgaacattggatcggcctgggcgcaactgtttctgatcgcgtttctgcgctgatcaaagacgctaagaaagcagcttaatctgtcgcggtggtggttattatgagcaaacaactcaatccagtggttcccgagcagccgattgttcttggcaaaatgggttcaacttacggcattcgcggttggctcagagtattttcatccaccgagaacgccgaaagcatttttgactatcagccgtggtttatccagcaggccggtaagtggcagcacgtcgagttggaagactggaagcgccacagtcaagatttgatcatcaaagtcaaaggtgttgacgatcgggatgctgcgaatctgctaactaattgcgaaattatggtggattcgaaacaattgccagaactagaaggtgatgattactactggaaagaccttatgggctgtcaggtagtaaccacaaccggttacgaactgggtaaaatcatcgatatgatggaaaccggttctaacgatgtcatggtagtcaaagcaaacctgaaagatgcattcggtatgaaggagcggttggtcccgtttcttcatgggcaggttatcaagaatgtcgatctcactgctcaacgtgttgaagtagattgggatcctggtttttgacctctgaattaaacggcaacggcgagtggaacaaaacgatgtggattggtgttatcagcctgtttcctgagatgttccgcgcaataaccgattttggggtaactggccgggcagtaaaaaatggcctgctgagcgtgcagtgttggagtcctcgtgactttacctacgatcggcatcgtaccgtggatgaccgcccatacggcggtggcccgggaatgctgatgatggtgcaaccgttaagggaagccattcatgcagcaaaagcggcggcaggcgagggagcaaaggtgatttatctgtcacctcaaggacgcaaactggaccaacagggtgtctgcgaactggcaaccaaccagaagatgattttggtgtgtggtcggtacgaaggtattgatgagcgcgtaatcaaaaccgaaattgatgaagaatggtcaattggggattacgttctcagcggcggtgagctgccggcaatgacgctgattgattctgtatcccgctttataccgggcgtactgggtcatcaggcctcggctgaggaagattccttcgctgatggattgctggattgcccgcactatacccgtccggaggtgttggaaggcatggaagttccgccagtattactgtcgggcaaccacgctgagattcgtcgctggcgcttaaagcagtcgctgggccgtacctggcttagaagacctgaacttctagaaagcctagctctgactgacgagcaaatggtgttgctggctgagttccgaaaggagcaagaggcctgagcgacagaactatgaaaggaacgtttcgccgcgtgcaaacgatcctgatatatcagtttacctagggtaagagacttattatgagcaatattatcaagcaaatcgaacaagagcagatgaagcaagacgtacctgcattccgtccgggtgattccgtggaagttaaggtatgggtcgttgaaggtgctaaaaaacgtctgcaggcattcgagggcgtggttatcgcaatccgtaaccgcggtctgcactctgcattcactgttcgtaaaatttccaacggcgaaggtgttgagcgtgtattccaaactcactccccagtaatcgacagcattactgttaagcgccgtggtgccgttcgtcaagcgaaactgtactacctgcgtgagcgtactggtaagtctgctcgtatcaaagagcgtcttaaccgtattaactaagatacagctcaggcttcatccaatagttaatagttatcaaggggttggccattggctgacccctttttttatctgtaaagtctctcaaagctcccgtttacttttcttattgatataaactgccattccgtctacctcagttattttattgatattttttgcgcaccgcctcgaataaaccaagtaaaaactttgataataaagctagctctggctaggctgcatctcattcaattgaatgctaaagccaataagaggaagaaaatgctgcaaggaaaaagagctgtggtgaccggtggtgggcgcgattttggtcaggctgtttcagtatggttagcgcgggaaggtgctgaagtcgttttatgcagtcgggttatcgcgcaggcgcaggcaaccgtggatattattcgcgccgaaggtggtattgccgaggcctatgagtgcgatatttccgatatgaattcagtccggcagttttctcacgggttactaaaacatgaaaagccgatagatatcctcttgctaagcgcggctcaatggctggaaggggatttacaaacaggcggtggcgatgaggatattattagcaccattaatgccggtttaacgggctctattttactgaccaaagcgctactaccgaggatgaatagagagcagggcagcgatattatcgcgatggtttctgtctgcggcgtgccgaatttcactcaatctaacgcccatcccgcatttttcgccgctaagcagggttttagcggcttttgccatactatttcccagagcttagctgctgaaaatatccgtttgaccgcgctgtatcccccagattttgaaacccttggttttgacgaagatatttctcatcataatcagacaaaccaacgcttgttaaccggccaatctatttggcaaaccgttaaatttgtcgtgactcagccgcgcagttgccacatcaacgctattcattttcagggaccgagccgcgaaccgttgggataaatggatgagttagttataggaaggagagcgtcagtgaggaaaatcttagcgtgactgcgccacgctaagaatattcagatgattacagaccgtaaaccagcgtgactgaggttgtcgtgtcggtatttttgggggcgctggccggaggcttggtgttgtaggtaacaacgtaagccagacgcagagcaaaactcttattgattgctacgtttaacgcagtttcagagttcagcgtagtctcttcgttggctaaagctgaaacgccttcgctaaacacggtgttatcggtcaactgataggtatagttggtgccagcataggccaaggctttagttgcgcggccaccgcgatagaattcgtcatggcgaacacctggaccgaattccacgcgcagattatgtaaagcgccggtaagaatctgccgaccataaccggttgtgagtacggagcgagaatcgtagccgttataacgatcgttcaaccagctggcttgaccgaacagatagttgcggtcggttagattatagcgagtacgtccacctaactgatagcgctctgaagatcttacctcattggagctggtgtttcttgcggagccccaaaggctataagccgtattgggttggaaccaggtcaacgtggagttggctgtcagggttgagttattagtattccccgattgagcgttataacccgcttcgacattaccgacaaaactgtgtttagcagtagcaggatcatcaagtgcggtaaaaacggtggcatcggcaaaagctgatgcgctgaacatagacactgctaacgtactgaaataaaaaggtaacgccctggtatgacgcaaagagaacataatgcttccatggtaaaaaagaataagattgataatgcggccggcattgtatcaacttgcgatcaaagttattcataagatattgccaatcttcaaataaattataataaacgcatttcacatatgagattattattagcaattattttttatgacaggacgcagggcagaaaagtcggcaataaaccatattttgtctgtgagaattggataaaatatcaggggatagggtaataaatttaattttttggctttatccctcagtgttaattgagtttcctgacttaagttaatttttatgggtggaggggcaatttcttaccccttgatgatttttaaacggattttattacataaaggtatttaccagcagataaccagtcatacaggagcacaccacgccgattaaaccggggatgataaaactatggttaatgataaagcggccaatttttgtcgtaccggagcggtcaaaaccgatgcaagccagatcgctgggataagtcggtaatacaaagtaaccgtaggccgcagggaagaaggcgatcagcattttaggatcgacacctaattgcaaccccataggagcaatagctgccaatgccgccgcctgactgtttaccagcttagaaaccaaaaacagtacaatggcataggtccacggctggctttttaccacgtcttccagtaccagttttaattcccccatatgtgcctggaaaaaagtatcactcatccaggcgacgccgaataccgagaaaatcgctaccatgcccgctttgaataccgcaccgtttgaaatatcgctcggtttaactttacagcccatcagaatcactgcaccggcaattaacatcatcatctgaataaccagattcatagagagcggtttaagtacgcctttaacttcataagccggacgtaaatcgccaaatgcgccgagtaatacgacgatggcgatggcactaaagaatatccaggttgaccagtaagcctgtttcgggaaaacctgattcagcagcgtatcagtgctgccatatatgaaggcacgttgctccggatcttttattcgagcctgaaaatcagggtctttatccaaatctttaccgcggcgtaggctccacagcgctgcggctaacacgcccactaacgaagcgggaacagaaatcgccaaaatttccagtatgctataagcatgcccgatgccgtgagccgcgccaataatagaaaccagagaaactacggccactgataccggcgatgcggtaatggccatttgcgaagcaacggaagcgacggccattgggcgctcgggacggattcctttcttgagggcgatatctgaaataatcgggaacatggtataaaccacatgtccggtgccgcataaaaaggttaatgaccaggttgtgaacggagctaatagcgttatatgttgcggatgccgacgtaataagcgttcggcaaactgcatcatgatatttaatccgccagcggtttgtaatactgaagcacagccaataaccgctaatatcgtcagcatgacatcaaccggtggtttacccggttcaaggccaaatataaaggttaaaataaataagccgatgccactaataaggcctagccccatgcccccaaagcgagtgccgattaataggcacagaataataattgcaaattgcagtgttatcataacgatcccttgtatttttctgtatgaaaaaagcttgttagccaatcctgtttttaaaatgtcatatttttctttgctataaccatcaaagcacagatcgctaaagcaaaaacttggctaatatcaagagagcgcgtcttatttattgaatgaattaaaaccgagaggaagatctgttttttataatttttagtcgagaaaaaagaaaggaataatattggttatccctgatggttattcatgtaaaacgattgttttaatattgttcgatatattgttgggctgggttttaattagctatttaattaatccagatttgctgaagtatttcggcatctttaactgaatcacagctggcagggaaattatcgccccgttcaaagtgaattttcaagcgggcaggctggcaaagatcctgttgcccagcatgataacctgataggtaatagtcgcgattaatgtgtggattgccataccattcggctagagtctcattatctctgacaatcaacccgccctgagcatcactgaatccgatctcataccagctcgtcgggtctttgacttcatcattagggtcaagagaatggctacagccgctaagtaacagcgcaccgatcatcatctgcttatatttcatggtgaagttcttctgcaaccgatttgcgatagctgttttagataatgatatcaggctatgcctaacttctctttaagtggttttagataacgtcggctaaccgggatgtgctttccggtgcgagtgacaacttctgctgaaccgttatccataagctgtatttcgcctagctgttccgtgttcaccatatattgacggtgacagcgaataaaaggcgttttttcttccagcgttttcaacgagagctgggtataacctgattgcaccatgcccacaacgtgcacaccgctaagctctgaactgagatattcgacctcttctattttcaaaagaaagatacgattatgcccggagcagggaatgtgacgcagcatcggttcggtgattttgtgtaaattattatttacagttaggcctcgacgcaggcgaataagtgtcttggccaatcgttgctggtcgaggggttttagcagatagtcgaaagcatgttcttcgaaggcgcggacagcatactcgtcaaaggcagtgacaaacacaatgtggggcatgctctctgggttcagcatgctcgctagctccagtccgttgatgcgaggcatttgaatatcgagaaatacgacatccggctggagccgctgaatcgcggggatagcttctatagcgttactgcattcagcgataacctcaatgtcttgctcttcacttaatcgttcgcgtaaatcttcgcgcgcaggttgttcatcatcaacgatgatcgctctcagcatacttcctccacaaatttttctcattttatcatggtgatttgctgcttggagaaccatctgtacaaactgcgacatcccgcaaaagttagccagattgtgggtgtaaagtttgcggtaattatttatttacagatatggattgaaaagtttacacggcgtgatattgtggaactcagaaacgacaccgcacatgaaacgatactcgcttaacagaggtaggtaggaaatatgatcatgcaaaaagatgcgctcaataacgttcatatcagtgctgaacaaatactgattacgccggaagaactgaagaatcggttcccgttgagtgaaaatgatcaatatgcaattgcttcgtcgcgcaaaaccattgctgatatcgttcaggggcgcgacccgcgtttgttagtggtttgcggtccttgttccattcacgatgtggatgctgcgttggattatgctcgtcgtctgaaactcctctctgctgaattgagcgatagcctgtacatcgttatgcgcgtttattttgaaaaaccaagaactaccgtaggttggaaaggtttgatcaacgatccgtacatggatggttcttttgatatggaagcaggcctgcatattgctcgacgcctgttgctggatttagtgggtatgggattgccattggcgaccgaagcacttgacccaaatagcccgcaatacctcggcgatctgttcagttggtcggccattggtgcccgtaccacggaatcccagactcaccgtgaaatggcatctggcctatctatgcctgtaggttttaaaaacggaactgacggcagcttaggtacggcgattaatgcgatgcgcgccgcatctatgccacatcgttttgttggcattaatcagtctgggcaggtgtgcttgttgcaaactcagggcaacccggacggtcatgtgattctgcgcggcggtaaaacgcctaactacagtgcgcaagatgtggcgcagtgtgaaaaacagatgcaggacgcgggactcactccatccttgatgatagattgcagccatggtaattcgaataaagatttccgtcgccagaccgcagtagctgaatcggttgttgagcagatcaaagcaggtaatcgttcgattatcggtgtgatgctggaaagtcatctgcatgaggggaaccagtcatctgagcaaccgcgggaaacgatgcattacggtgtttccgtgaccgatgcctgcattaactgggaaacaacggaaactctgttacgttcgatgcataaagaattaagcccggcgctggcggcgcggactgtagaggaatagtcgttatggtggctgaattgaccgcattgcgcgatcaaattgatgaagtggataaagcgttgctggacttgctggcgaaacgcctgagtctggtggctgaggtgggcgaagtcaaaagccgctttggtttgccgatttatgtgccggatcgtgagtctgccatgctggcgtcacgccgcaaagaggccgaggcgctgggcgttccccccgatttgattgaagatgttttacgccgggtgatgcgtgagtcatatgccagcgagaatgacaaaggctttaaaaccctgaacccacagctgcgccccgtcgtgattatcggtggtaaagggcagatggggcagttattcggtcggatgttattgctttcgggctatcaggtaaaaacgctggagcaggaagactggccgcaggcggaatcgattctggccgatgcaggaatggtgatcgtcagcgtacctatccatgcaacagaagaagtgattgctagcttacctaagctaccgacagactgcattttgctggatttggcatcggtgaagaatcgtccactgcaatcgatgctggcagcgcatgaagggccggttgttggtctgcatccgatgtttggtccggatgtggggagtctggcgaagcaggtcgtggtgtattgtgatggtcgtcagcctgaagcttaccaatggttattggaacagttgcaggtatggggcgcgcggctgcatcgtatcagcgcggttgaacatgaccagaatatggcctttatccaggcgctacgccactttgccacttttgcctatggtctgcatttggcggaagaaaatgttcagcttgaacagcttttggctctgtcctcgccgatttaccggttggagctggcgatggtcgggcgactgtttgctcaggatccgcagttgtacgcagatattattatgtcgtcggaagataacctggcgctgattaaacgttactaccagcggtttggtgatgcgattaagctattagaacagagtgacaagcaggggtttgtttccagcttccagaaggtggaacattggttcggtgattatgctgaacgcttcctgctggaaagtcgctctttgctgcgccaagcaaatgacaatcggcagtaatcattaatatttatgctgttagccagtaaaaaagtcatcccagacgatcgggatgactttttttatgagcaaaaataggtagcgatcggcgattaacttgggttaaccggcaccacgttttcactcggatagcagcccaacacttttagtgaacgggttagcagcgtcaaatcgctgagcgccttttgcatcgcttcggaacgcaggttagcctgcacatcaatataaaacatttcttcccacggattcccgttgattggccgagattctagcttggtcataatgatgccgtgttctttcaagaccagaagagcttctactaacgcccctgattgttggccagtagccataatcagcgtagttttagctggaatctgctcagaaacatcaatagctttacgcgccagcacgatgaaacgagtgatgttttgctgctgatttgccaaatagtattccagtacctgcaaaccatagagcgcgccaccggcttcgctgcccaatgcggcggcttttggggaatttagctgtgcgactttttccattgcggcggcggtgctttcgcaatattcgattttccagtgcgggaaacggttaatgaactgactacattgttggaaaggctgcgggtggctgtaaaccgtttcaatctgacttaaatcggtctccgcagccgtcagaatgcagtgctcgatcgggttggttaattctccgactatcgacaggctagtatgttgcagcagatcgtaaacatcattgatagagcctgaactggtgttttcgatcggtaaaatcgcgtaatccgcctgaccggtttctacttgagtaaagatatcctggaatttcaggcagccgcattcgatcaggttatcaaaatgacgggcggcgtattgacgtgcggccaaatgagagtaagaaccttttgggccaagaaatgcgatgcgcgctgaatgagcggtagtttggttcaactggtgttgcagcaatgtctgttgggtcaatactgagtcttcaataatcagctggaacagacgggtgatataaaatccgtcgagatcgtaaggtttagcagcagtaatcaaagcctgcagtaaatccttctcacgttctttatcacggatcggacgatggctgtgttgcttggctcgagccacttcgattgccaactcgcggcgttctgccagtaacgccaacagctttaagtctaaagcgctgatacgttctcgtagcaccagtaacggattgtctgtcatagggtcagccttattatttttgccaaatgatttatgcataaaaaaagcctcccggttgggaggcttgtttgttcgtcttcgcattctttatcacacgacgaaacgcctcccaatcaggggaaggtaaaaaagaatgcgaagaaaaacggtttgtagctcatgtgatggttgatggcctaatagtcgcgaatggagttaacttaactgccgccagttatggcgtcaataaaaaacgcgcccgaaggcgcgttagatcctcaataagatggttaacccgttactcttcttgctcaggctcctctatcagattgacatttttgatactagcggcggtacgttttgcctcacctttgtgctgaactttgtttagttgtcgttctaatttcgcgatcagctcgttgattgcggcatacatatcatcgtgcttggcactggctaccagagggccgtttggcgtacctatggtcgcatcaacaacaaatccttcagggtctttagacagcacgatatgcggatttattagctgagcttgccacttatccagtttggttagacggtcttcaacatgcttacgaattgcaggggtgatatccatttgtttgctagtaatattgactgcggtcatatggcttacctcgttgtcttctccgtcttggataacttcagcatacctctcttttcggtaaatagaatgatctaaatcacattttcttgtcactttttgcaaaggcgacctgaactgtgagccagtattaggaaagtgatttaagagcttgaatcatcggaaaaaatgtcgcaatatcgataagatcggccagcgatattggagccgaaattctgcttttacccctctccctcaatggcttagtccccccttaacctttcagatccagagcgggtcgggttttgtatgctacccgtgactcaaattaccgcgcaggtttccctatattgggaaccgggagaaagtacgttttacagattaaggaaaggagggcgttcaattttgcgactaacagaaacaaaaacggcagccgaagctaccgttgttttgtctcattggctcacgccagtgtagccatcccactatgcagggttggctgcaatcactttactgactttatctgcctgcgcattcaactgaatttgcttgtaggcattttccattaacggcagtgcatcgcgagtcgctttggtgtctgggtaattgcgcatcatttgctcaacacggttaattaccgcaacgtaagcaccgcgcttagtgtagtatttagcaacggccagttcatgcttggccagtcgatctttcaagaacaccaggcgtttttgggcatccgtagcatactgactgttcggatagctttgaattaactggttaaaatcgcggaaagcagctcttgcatgctgagggtcgcggtctgaacggtcaatcccgaagaagccttgtaatgcactgtcatccagagccatgtcagtcagaccacgcatatataatacgtaatcaatgttaggatgtgtgggattgaggcgcataaagcgatcgatcgaggcctgagccagcggcaaatcggcagatttataataagcataaatcaaatccaactgcacttgctgggagtaaggcccgaaaggatagcgattatctaacgcttctagttgcgtaatagctcccttaaagttaccgtcctgcagtttttgctgcgcggtagcatagagctcagaaggcgggttgtcgggaaccacgtccttgttactggagcaaccggtcagcaccaggctcaacgtggcggcagccaccagatatttcatacgcgtcatgacgttttgattatcctcgaagtgttattccgggagactgtccgttaagctcccgacaaagatctagatacaatagcacattatattaaacggcatcgccgtcaaaacccaacgttaacgaagaagctgcatatggcacaacaagtacaactcagcgcaacggtggccgaatctcaactcggtcaacgtttagatcaggctttggccgaattgttccctgattattcacgatctcgcataaaagagtggattttggataatagggtctcggtcgatggtaagacaattaataagccaaaagaaaaagtgttgggtggcgagatcgtcgcgattgacgctcaaatagaagaagaagcccgctgggagccgcaggaaatcccattggatatcgtgtacgaagatagcgatattctggttatcaacaaaccgcgcggcttggtggtacaccccggtgcaggtaatcctgatggcacggtattaaatgcgttattgcattattaccctgaaatcgtggatgttccccgcgctggcatcgttcatcgtctggataaagacaccacaggtttgatggtcgtggcgaaaaccgtcccggctcagactcgtttggttgaagcgcttcaggcgcgcgaaatcactcgtgaatacgaagccgttgccattggtaaaatgacggcgggcggtctggttgatgagccgatttctcgtcactcgaccaaacgcactcacatggcggttcaccctatgggtaaacctgcggtgactcattaccgcattatggaacatttccgcgcgcatactcgcttgcgtctgcgtctggaaacgggccgtactcaccagatccgcgtgcatatgtcgcatattaaccatccgctggtgggcgatcagctttacggtggccgtccgcgtccgccaagaggcgcatcggataatttcattgccgtgctgcgtggtttcgatcgtcaggcactgcatgccaccatgctgcgtttgtatcatccaatcagtggcgttcagatggaatggcatgccgctctgccggaagacatgattgagctgatcaccgctttgaaagccgatactttagaatttaaagatcagatggattggtaatgaagccgctgattctgccgcaatggccacagccagccagcgttaagtcgtgcagcaccacccgcagcggtggtgttagcgtgccgccttatgattctctgaatttaggggcgcacgtaggcgataacccggcggatgtggagcagaatcgccagcaattaattacgctggcggcgctgccacaggctccgcaatggctggaacaggtgcatggcacgcgagttttacgcctgaacggcgagcccatcgcggatatccaggccgatgcggtatacagcaacgtgcctgggcaggtttgcgcggtgatgactgccgactgtctgccggtcttgttctgttcgctgacgggagacgaagttgcggcggctcatgccggctggcgtggcttatgtgccggcgttcttgaacagactttggcagaattcagcgcaaaaccttcttctattattgcctggttaggcccggcgattgggcctcggcaatttgaagtgggagcagaagtaaaacaggcattcgttagcgcagacccccaagctgcgctggcgtttactccgtttggtgacaaatatctggcagatatttacctgctagcccgccagcggctggcgtcagcgggtatccacgaagtgtacggtggcgacctttgtacagtgagtgatgagcaacaatttttctcttatcgacgcgaaggaatcaccggccgcttggcaagtttaatctggttgatctaacctattgaattaggacgatccaatgacgcataccacaaaactcaaatatattggctaaaataaccttgaaaagctgagggatgacctcatctaatctccagtagcaattttgaccagtattggaggtgttatgcgtctggatcgtcttaccagtaaattccagcttgccctcgccgatgcccagtctttagcccttgggcgcgacaaccagtttattgaaccgttacatttgatgagcgctttgctcactcaggatgggggcacggttcgcccattgttaacctctgccggtatcgatgttgcgcgtttgcgcacggaaatcgatcaggctttgggacgcttgccgcaggttgaaggtaccggcggcgatgttcagccatcccacgaattagtgcgggtactcaatctttgcgacaaactggcgcaaaagcgcgcagataaatttatttcttcagaattatttgttctggcggtgctcgaagatcgcggttcgttgaccgatctattgaaagccgcaggtgcaacaaccgataaaatcagcaaggcaatcgaacaaatgcgtggtggagaaaccgttgatgacgccggtgcggaagatcagcgccaggcattgaaaaaatacaccattgacctgaccgagcgcgcggagtccggcaaactcgatccggttattggccgtgatgaagaaattcgtcgcaccattcaggtattacagcgtcgtaccaagaacaacccggtactgattggtgagccaggggtgggtaaaaccgccattgtggaaggtttggctcagcgaattgtcaacggtgaagtgccggaaggtttgaaacacaaacgcgtgctttcattagatatgggcgcgttgattgccggtgctaagtatcgcggtgagtttgaagaacggctaaaaggcgtattgaacgacctggccaagcaggaaggtagcgtcattctgtttattgacgagttgcacaccatggtcggcgcaggtaaaggcgacggtgcaatggatgcaggcaacatgctgaaacctgcgttggctcgtggtgaattgcactgcgtaggtgctactacgctggatgaatatcgtcagtatatagaaaaggatgcggcgttagagcgtcgattccagaaagtatttgtagcagaaccgacggtagaagacaccattgccatcttgcgtgggctgaaagagcgttatgaattgcaccatcatgtgcaaattactgacccggcgattgtggcggctgcgaccttatcgcaccgttatattgccgaccgtcagttgccagataaagccatcgaccttatcgatgaggccggttctagcctgcgtatgcagatggactccaaaccggaatctctggatcgtctggaacgtcggattatccagttgaaactggaacagcaggcgctgaataaagagtctgacgacgccagtaagaaacgtttggaaatgctcaatgctgaattagagcaaaaagaacgcgaatattcagagttggaagaagagtggaaagccgaaaaagcctctttaaccggtactcagaatattaaaaccgaactggagcaggccaaaattagtctggagcaggctcgtcgcgttggcgatcttggtaagatgtccgaattgcaatacggtaaaattccagaactggagaaacagctggctgccgctactcaggccgaaggcaagaccatgaagttgctgcgtaaccgcgtaactgaaacggaaattgccgacgtgctggcgcgctggaccgggattccggtggcgcggatgctggaaagcgagcgcgacaagctgctgcgtatggaacaagacctgcatcagcgggttattggccagaacgaagcggttgaagccgtttctaacgcaattcgtcgtagccgtgccggtttgtcagatcctaaccgtccgatcggttcattcctattcctcggcccaaccggggtaggtaaaaccgaattgtgtaaagctctggcgactttcctgttcgacagcgacgacgctatggttcgtatcgatatgtccgagtttatggagaaacattccgtatctcgtttggttggtgcgcctccgggctacgtcggttatgaagagggggggtatctcaccgaagcggtacgtcgtcgtccttattcagtgattctgctggatgaagtcgagaaagcgcatccagatgtgttcaacatcctattgcaggtattggatgatggccgcctgaccgatggccaaggtagaacggtagacttccgtaataccgtcgtcatcatgacgtctaacctggggtctgatttaattcaggaacgcttcggtgaaagaagctatacggaaatgaaaaacatggttatggaagtggtcagccatcacttccgtcctgaattcattaaccgtatagatgaagtcgtcgtcttccatccgttggggcgggggcaattggcttcgattgccaagattcaattggagcgtttgtacaaacgtctggaagaacgtggctacgaagttactattaccgaacctgccttggagttcttgggtgaagctgggttcgatcctgtatacggggcgcggccgttgaaacgtgccatccagcaggaaattgaaaacccgctggcgcagcagatactttccggcaagttattaccgggtatccctgtgatattagatgttgaagacgggcatatcgtggccaaacagtcatagtgaaatggaaaggggcgatttatcgcccctttttgctttctttttacccagaaatgccatttttgatgtatttatagccggttggaaaattatttgaaattaggggttgcagcctgtcaggaactccctataatgcgcctccactgaccgggaacaacgaaacaaacttcgccgggtcaggaagtgttaagcaggcggaaacgccggttcttaaaacgaaagttgaaaagaaaagcttgacacttcagcgggaaagcgtattatctgcctcccgcgttaccgtaagattcgccgcaagcgaacgggtaacgaacgctctttaacaatttatcagacaatctgtgtgggcactcgcaagacgatatcaaagcctgtttcggcaggcagaagaaatatcaagtcttgaagagtgaccaaagcagtaaacatttgaacttcggttcgaatgcatatttgcagaaagtaatctttgagcatcgctacttcggtagcaaatcaaacaaatcttaaattgaagagtttgatcatggctcagattgaacgctggcggcaggcctaacacatgcaagtcgagcggcagcgggaagtagcttgctactttgccggcgagcggcggacgggtgagtaatgtctgggaaactgcctgatggagggggataactactggaaacggtagctaataccgcataacctcgcaagagcaaagtgggggaccttagggcctcacgccatcggatgtgcccagatgggattagctagtaggtggggtaatggctcacctaggcgacgatccctagctggtctgagaggatgaccagccacactggaactgagacacggtccagactcctacgggaggcagcagtggggaatattgcacaatgggcgcaagcctgatgcagccatgccgcgtgtgtgaagaaggccttcgggttgtaaagcactttcagcgaggaggaaggcatttcacctaatacgtgaagtgattgacgttactcgcagaagaagcaccggctaactccgtgccagcagccgcggtaatacggagggtgcaagcgttaatcggaattactgggcgtaaagcgcacgcaggcggtttgttaagtcagatgtgaaatccccgagcttaacttgggaactgcatttgaaactggcaagctagagtcttgtagaggggggtagaattccaggtgtagcggtgaaatgcgtagagatctggaggaataccggtggcgaaggcggccccctggacaaagacygacgctcaggtgcgaaagcgtggggagcaaacaggattagataccctggtagtccacgctgtaaacgatgtcgacttggaggttgtgcccttgaggcgtggcttccggagctaacgcgttaagtcgaccgcctggggagtacggccgcaaggttaaaactcaaatgaattgacgggggcccgcacaagcggtggagcatgtggtttaattcgatgcaacgcgaagaaccttacctactcttgacatccacagaacgtagcagagatgcttcggtgccttcgggaactgtgagacaggtgctgcatggctgtcgtcagctcgtgttgtgaaatgttgggttaagtcccgcaacgagcgcaacccttatcctttgttgccagcacgtcatggtgggaactcaagggagactgccggtgataaaccggaggaaggtggggatgacgtcaagtcatcatggcccttacgagtagggctacacacgtgctacaatggcagatacaaagtgaagcgaactcgcgagagcaagcggaccacataaagtctgtcgtagtccggattggagtctgcaactcgactccatgaagtcggaatcgctagtaatcgtagatcagaatgctacggtgaatacgttcccgggccttgtacacaccgcccgtcacaccatgggagtgggttgcaaaagaagtaggtagcttaaccttcgggagggcgcttaccactttgtgattcatgactggggtgaagtcgtaacaaggtaaccgtaggggaacctgcggttggatcacctccttacctaatgatacgcattgcgcagtgtccacacagattgtctgatagaaagtaacgagcaaataaggccgggctgagagattagtcgggctttagtaccttgttgggtckgtagctcaggtggttagagcgcacccctgataagggtgaggtcggtggttcaagtccactcagacccaccaactcatccctgtagtgcgttaccgtcacattcgtttataacaataaacgtgcgtgtctgcgccttgtctggacatgagttgcagcaataaggtatttgctttttatatggggctatagctcagctgggagagcgcctgccttgcacgcaggaggtcagcggttcgatcccgcttagctccaccatataaaactatttcaaaatatattgctgccgcaaggtggacagtatgttgtgaaatattgctctttaacaatctggaacaagctgaaaattgaaacactgcagctaaaacttgtctctccgtagatttaccgagacaaggagtcacctgcaggtagagtctctcaataatcgcagcacgatgatgtcgaaagacaccttcgggttgtgaggttaagcgactaagcgtacacggtggatgcctaggcagtcagaggcgatgaagggcgtgctaatctgcgaaaagcgtcggtaagctgatatgaagcgttacaaccgacgatacccgaatggggaaacccagtgcaattcgttgcactatcgttagatgaatacatagtctaacgaggcgaaccgggggaactgaaacatctaagtaccccgaggaaaagaaatcaaccgagattcccctagtagcggcgagcgaacggggaggagcccagagtctgaatcagtttgtgtgttagtggaagcgtctggaaagtcgcacggtacagggtgatagtcccgtacacaaaaatgcacatgctgtgaactcgatgagtagggcgggacacgtgacatcctgtctgaatatggggggaccatcctccaaggctaaatactcctgactgaccgatagtgaaccagtaccgtgagggaaaggcgaaaagaaccccggcgaggggagtgaaatagaacctgaaaccgtgtacgtacaagcagtgggagcaccttcgtggtgtgactgcgtaccttttgtataatgggtcagcgacttatattttgtagcaaggttaaccgtataggggagccgtagggaaaccgagtcttaactgggcgtctagttgcaaggtatagacccgaaacccggtgatctagccatgggcaggttgaaggttgggtaacactaactggaggaccgaaccgactaatgttgaaaaattagcggatgacttgtggctgggggtgaaaggccaatcaaaccgggagatagctggttctccccgaaagctatttaggtagcgcctcgtgaactcatcttcgggggtagagcactgtttcggctaggggtccatcccggattaccaaaccgatgcaaactccgaataccgaagaatgttatcacgggagacacacggcgggtgctaacgtccgtcgtgaagagggaaacaacccagaccgccagctaaggtcccaaagtcatggttaagtgggaaacgatgtgggaaggcatagacagccaggatgttggcttagaagcagccatcatttaaagaaagcgtaatagctcactggtcgagtcggcctgcgcggaagatgtaacggggctaaaccatgcaccgaagctgcggcagcgacacttaggtgttgttgggtaggggagcgttctgtaagccgttgaaggtagtctgtgaggactgctggaggtatcagaagtgcgaatgctgacataagtaacgataatgcgggtgaaaaacccgcacgccggaagaccaagggttcctgtccaacgttaatcggggcagggtgagtcgacccctaaggcgaggctgaaaagcgtagtcgatgggaaacaggttaatattcctgtacttggtgttactgcgaaggggggacggagaaggctaggctagccgggcgacggttgtcccggtttaagcgtgtaggggggtattcctggtaaatccggaaaaccatcaaccctgaggcgtgatgacgatgcacyacggtgcagaagtagttgatgccaagcttccaggaaaagcctctaagcatcaggtaacattaaatcgtaccccaaaccgacacaggtggtcaggtagagaatactcaggcgcttgagagaactcgggtgaaggaactaggcaaaatggtgccgtaacttcgggagaaggcacgctggcgctaggtgaagagacttgctctcggagctgaagccagtcgcagataccagctggctgcaactgtttaataaaaacacagcactgtgcaaacacgaaagtggacgtatacggtgtgacgcctgcccggtgctggaaggttaattgatggggtcagccgcaaggcgaagctcttgatcgaagccccagtaaacggcggccgtaactataacggtcctaaggtagcgaaattccttgtcgggtaagttccgacctgcacgaatggcgtaatgatggccaggctgtctccacccgagactcagtgaaattgaactcgctgtgaagatgcagtgtacccgcggcaagacggaaagaccccgtgaacctttactatagcttgacactgaacattgagccttgatgtgtaggataggtgggaggcatcgaagcgtggacgccagtctgcgtggagccaaccttgaaataccaccctttaatgtttgatgttctaactcggccccataatctggggtgaggacagtgtctggtgggtagtttgactggggcggtctcctcccaaagagtaacggaggagcacgaaggttagctaatcacggtcggacatcgtgaggttagtgcaaaggcataagctagcttgactgcgagagtgacggctcgagcaggtacgaaagtaggtcttagtgatccggtggttctgaatggaagggccatcgctcaacggataaaaggtactccggggataacaggctgataccgcccaagagttcatatcgacggcggtgtttggcacctcgatgtcggctcatcacatcctggggctgaagtaggtcccaagggtatggctgttcgccatttaaagtggtacgcgagctgggtttagaacgtcgtgagacagttcggtccctatctgccgtgggcgttggaagattgagaggggctgctcctagtacgagaggaccggagtggacgcatcactggtgttcgggttgtcatgccaatggcattgcccggtagctaaatgcggaaaagataagcgctgaaagcatctaagcgcgaaacttgcctcaagatgagtcttccctggggcttcaagccccctgaaggaacgttaaagactatgacgttgataggctgggtgtgtaagtgcagcgatgcattgagctaaccagtactaatgatccgtgaggcttaaccttacaacaccgaaggtgttttagagagcgttttgattttcagcattgttaacagattggattgactggctgtgtggtgtaaatcacgtggcgggttgattgaaacagaatttgcctggcggcaatagcgcggtggtcccacctgatcccatgccgaactcagaagtgaaacgccgtagcgccgatggtagtgtggggtctccccatgcgagagtaggacactgccaggcatcaaataaacaaaagaggctaccctaacgggtggccttttttgtttgtctcgtttgggtggtgtgcgactcgagcatgcatgcgacaaactgcgcctgcgctggccccagcggggtgagtctcatccagaagatgagacgaatacagtggacactgccaggcatcaaatcaagcccagaccccatgccaaaagcgtggggtttttgctatggaaaaaagacagacgcgaggcggataaaagtcattgccgccctcgaaccgagcctcctgcgattgcggggggctttttgcgtttaagggcatgggaacccccgggaatgccgggcgttgaaggcgtatatggcgattttcattccataaggggcggcttatccggtaaattgcgccgccgttgacgttttcaggcagtaaattcgcagcattttcaggcagatacagtcactcaccgggcttatattaggtggggaatcaactaccgtcccagtaacattgatttttccatcaacgctggcaccgaaggatattatttagagagatagcactgaccagtaacgttttattgaatatagaaatatcctttaatagtttaaggatgagcattccgtaacgttgagtttaattcgctgcctgataaacaccgtatccggccatggcaccagctacatcccagacgaagtctttccagctccaccctgtaccgccctgacggctatcgtagaactctttccccgcacctatacctatagagaacaataaaccaaagctgcgactgcgggcgtctgaccaattctggtgctcgccatatgccgtgcctgccgcggcaaaagcagcggaggcgaagaagtgctgagctttgtctttccccgtccagctatcgttggccatgtgggtgcaggcagtgctcagaaagaataggggggcgatgacggccgaacggagatatgaacatcgctccatggagtattccttttgtagatgaaataaaaacctgtctttagataaagtagcatgtcaattccattaccgaaaccgatcagaaactgaatgaagggcaataagttagctactttagccgccagatataatcagccgccttttggagaccatatttacgggtaaactccgagccttaaaaatcagcgtctctttagtatgtaagatttaaatccgatgaagccaaaatatgttgatggcaaagtcgttagccataactttaatttggccaataaaaaacccggctattaaccgggttgcgatctgaccatcgaaatctacaggatgcggctgattagacggtcgatacgaattcgccgtaagcgacgaatcagtttcctgaccttcaccggatattgctgaatattttccagctcaaggtagtgggaaacaactttggtatgcgtacggatgcattctagctctttcgcccgctgttcgtgcatttcatgcttgggatcgtggatcaaaatggcgttttccagatccaggcgccaggcgcgcgggtttaggttattacccgtaatcagctgccaggtatcgtctacccacatgcctttcagatgataagtgttatcgccgtctttccatagtcgaaccacaagctggccgttatccacaaagcgctgtaagcgactgaggaagcggcgcagatttatttcatacagataaggtaaagctccgatgatcttgaaaggctgatcttccggaatatagaaatcgtttgccgttttgtccccgacaataatctcaacctgttttccttcgcgcagcaaataaatgatattgcgtaccagcagtgcaggcaggttgaaataaggagtgcagatagtgagcttttcgtcggcagaacacatcagatgatgtattgctttatttaaaggacttttctttcccaggccaaccaacggggtcacggctagttcatcattactgcttcgatccgtaaattcataaccgacatcacgcagggataagcggaattggcgggtctcgttttttatttcagggttttttggacgatcgctacgatctaagcgctgaaccgcaccggctcccaggatctgttgcttgatgtattccgccattgcattcgccatagccggatttttaattaactggtagcgatcgtaacggtatttatcgtgctgatgcagataaacatcattaatactggcaccgctgtaaatgactctgtcatcaataataaaacctttcagatgcagaacacccaaggcttcgcgagtatttaccggtacgccatacactggaacggcaacgcccggatgctttgccgccatatcacaataccaatcggcgttggtattaactgcagcagcaccaatacgcccgcgttgggcacgatgccagtcaactaatacgcaaatttccagctcaggccgctgttgtttcgcctgataaagtgcctgcatgacgtcccgaccagcatcatcttgttccagatacagtgcgaccaaataaatacgttgggttgcctgagcaattaattccagcagagttgcgcggaaaaccttcgggcagtaaagcgtttggacatcatcaactgactgggggagtttgggcagttgtgcaaggtgttgttgatgtttgctacgtttgaattttgacaacatcacagtgcgcttcttctctcgttatttgatggcaaaaccgccatagcttaagaatactaatccatagaatctggcgataataccactagttacccgtgttgtgcgtaagttttgcctgcgggttagctaatcgaccagctctgtggcctcggtcacccttatgttcgtcatctttcacgctggctgcttgcttccaatccaatgacttcgcgggttaagcttcggcaaatttgtgccgttgccgtttggccacggcgtgaaatttatcgggcataaatgagtcaataaatcacagtgttaattcgagattaacgattccgtcttccaactgtacgtcaacgttgaaccccaacttttgtgccagtccgatcatcccgcgattgtgcggcatggtaatggcggttaaacgggttaaaccgtggcctcgggtatagtgaatcattttctccaatagccgactgcctagccccaaacctttcaggtcggatcgaaccagtactgcgaactcggcgtcaatattgtctggatcgcttaaggcgcgagtgacaccaatgatttcgctgtttccatgttgctgacgcacagcgacaaaagccatttctcgatcgtagtcgatttgcgtcatattcgccaaatcatcgtgattgaactcgtttatctcactaaaatagcggtaataaagatcttcttttgtcaccttatcaatgaagtctttcagcaaaggctcgtcttctggcaggattgggcggaacaggcaggaggaaccgtcttttaggtgcaccagttcttccagttcttgcggatagggacgaatggccaggcgagtttgcggatcgccgctaattggcgccaactgcatagaaacatccaatagcgtgaattcactgccggaggccagcaccgggtgaatatccagacgggttatctctgggcaatcgagtatcagattggaaacctgcaccagcaggtggctaaggccaggaatatccaaaggttgtagcgcgccccgccggcgaatttttccaccttttaccgcctgtaaaatcagatagcgggccagcgccatattcagcggcggcagagcaaccgccgcctgtgtttcctgatgccactccacgccaccttctcccagcataatcagcgggccgaaaatggcatcttgctccaccacaatccgcagttcctgtgcaccagcgcggtgagccatgctttgtaccagcaggccatgaatacgtgcctggggataagtgcgcttaacccgatcgagaatatcatcagcggcgcgctgcacttctagcgcggtgcgcagatagagcattaccccctgaacctccgatttgtggggaatatccggtgagcgcagtttgattgctaccggatagccaatttgttcagcgatatgtaccgcttccacgctgtcactggcaatccaggttggcaggatgctaagaccgtaggcttgcagaattggctgcacttcatgggtatccaattgcgtagtgccttccgccagcgcctgacgaattaactgatgcacgtgagtggtattggctgttagtcctaccggtagagcgggtgtttcctttaattgtttctggttacggcggtattccaccatatgcataaaagcggtaatagcgccctctggagtgcgataagtcggtattcccgcttcggtaaacattcggcgggcgtcctgagatgaatattcgccacaccaattagttagtaaggtaattcgttttccgcgcgggtgttgctggatggccgaaatcagcagttcggccgttttattaccgggagccgccgcgctaggggagtgaattaatagcagcgcatcataatctgtactgtctaataacggcctgaccgccgccaggtagcgttcagcgctggcatcgtcccgtaggtctattgggttgcggatggtgacaaaaggcggtagtgcctcgcttagcgcgcgatgagtttgttccgataaggtcgccagcttgccgttacggctaatcaattcgtccagtgccatcgccgctggcgcagagccgttgctgacaatcagtagcttttcaccgcgtagcgggcgcatatgactgagcgtttcgaccgcagagaataattcgtgcgtgtcttgcactcgcaataaacccgctcgttggattgctgcgtcgtaggcggcgtccagcccttgctggccatcgagtaactgctgagcgcgctgagttcgaccactttttactactaaaatgggtttattacgcgaggcgctgcgagaggcggataaaaagcggcgggcgtcgctgatatgctcgatatacagcatgatggcgctggttttggcatcgcgagacaggaaatcgagcagatcatccaaatcgatatccaaactgtcgcccagcgcaataaagtaggaaaaaccgacttctcgctgctgcgcccagtccagcaccgtgttggccaccgccgccgactgggagatgaatgccagcttgcctttttgaatcggaactggagaaaaactggcgttcagtccttgccacggagccagtagcccaaggctatttggcccaagtaatcgcatgttatagcgatgggcacaggcttttaactcggcgaattgatctggcggcgcggacagaataataacggttttacagccgcgggtgcctaaggcatccaaaagtgacagattacggctggcattggtgcagagaatggctaaatccggcgttagcggcagggacgcgatatccggataggccaatacgccgctgaccgctttatagcttggcgtgaccggtaaaattggcccattaaacccgccgtccagcagattacgcatcatcaggaagcccgcccgctccggtttttcagaggcaccgataaccgcaatcgacttggggcgtaacagtgcttctaatcctcgttggctcatggcgtctcctgttagttaacctgctaaaggttgccagagagactttagtcgttttttggcagaattgctgtgacccgtggcactggatggtgaggtttgcctgctaagtattgctgcctgaaatagttaaagtgtgcgctcagtccttccgccgcttgcaaatcgccagcctgctccagcaaagcggcagcaacttcaacggtgcaatgctgttccggtcgctgggcttcgcgtagctgatagtttgaagtcatgttgacgttaagagaaagcatcggtaatcccgcaagatatgggcttttgcgaaacattttctttgcttctgtccaagtgccgtcgagcagaataaacagcggtggcttgccgcctgcagggatcttattaagaacctgtcgatccggttcggcgtaggcttcgggaaacacgacataaggctggcgggaaggatcggcaatggctgctagtagcgccgggtctacttcagttctggcccacaggaaggcctgtgtgttcggcagaatatcggcgattaaacggccggtattgctgggtttaagcggctcggtgtcgaacatcaccaaacaaaaacggctggtggcctgtaatggtctaatggtgtcgcacagacacagacgctcggccagcaggcaattttgacagcgaatggcgcgacaaccgcgggcgcggtaagggcgagtcgaagcgtcgaggcgttgtttacgcaggcgcagaacggcattttcagtcataacggcggcggcagatggtgtatcagtcacgactgactcctgagaaaaagcgctattctaatcaacccttggggacagggatagaacaaacgctccggcggagaaattctcggccggagcgggggagttaaccgcgatgattcactcgaaatgggttaaactaacgctagggtaaactgattactgcgccaattgctcatccagccagccttcaaaaggggctttaggcagcgcgccgctgagcatatcgaccattttgccgtttttatacagcataatggtgggaatgctgcgaatgcgaaaacgcgtactgagagcaggttccgcttcggtattgactttgacgaagcgaatcttgcctgcgcgctcattcgccacatcttcaaagattggcgcaaagctgcgacacggcccacaccaaggcgcccagaagtcgataacaaccggcaggtcgtcctgtagcagtttatccagcgtttctgcggtggcgttgctcacttcgccgtcaaacagcgaatgaccacagcggccgcatttagcgccatcatcaatacgttcttccggcaggcggttggtcgccatacatgctgtgcataccgtattcataaattagccttaattcttgggtaaagagagctggaaacaacagtattaagtggttttagcgtgggagagcgcgactctgaccacggtgttgtttcgtttatgttatctattatgatgacaaatgctgtcatcgccaaaaaggtttattcgatgaatacgatagttgccggcttttagcgctcgcttatggcttaccgggcggacatcaggtaatcttcgcgccctgcgcgttggtggagaagacaatgaacgattcatttagtggcaaaaacggcaaagttaaagtgatgtacgtccgtagtgacgagagcagcagcgacgaccgtaacaaaaacaagcgtccggcaggcaaaggccgtccggataacgcacgtcagggcggttcgcatcagggcaatccacgtcaggatggctcacgtcaggacaattcacgtcgtggtgactctcgtcgtagtgattcaggccgtaatgaaagcgatcgtcctcgccgtccggcccgttccgaagatcgcggcccgtacgactcaccgtggaagaccgtttcccgtgcgccgtccgaagagccagagtttgaccacggcggcatcggcggtaagagccatatcgatccggcacagctgcgtcgtcagcgtgcggaagaaacccgtgtgtatggcgaaaatgcctgtcaggcgctgtttaacagccgtcctgatgccattgttcgcgcctggtttgtgcagtccgtcacgccgcgattccgcgaagcgttgaaatggatggcggcaaaccgtaaggcttatcacgtggttgatgaagaagaactggcgaaggcctccggcaccgagcatcacggtggcgtatgcttcctgattaagaaacgtcagggtctggacgcggaaacttatctgcaacaggctccgcaacaagattgcgtattggcgctggaagaagtgggtaacccgcacaatctgggcgcaattatgcgtacttgtgcgcatttcggtattaacggcgtattgctgcaagatccggcaatgttggaatccggtgcggcagtacgtaccgcagaaggcggcgcggaacacatcaaagcgattaacgccgatgatttcctctccgtattggataccttccgtaacgcgggctacaccattgtgaccacttccagccataaagggacgactctggcgaaagccgagctgcctgccaaaatggtattggtgttaggtcaggaaagtgatggtctgacggacagcgcgtggcagcagggcgatctcagcgtttctatcggcgggactggccgggtagaaagcctgaatgtttccgttgcgaccggtattttactggcggaatggtggcgtcagaacagcggcgaataagccattgagctttgcgtagcacgcacagccagtgattttgtcgcgttgattcagcgggtttaacccggtaatccagtcaggctcaaactatgtttgggcctgatttgtttgtaacgtaatatgttaaatatttgattttttcagtatcagtatcatcctgttttcatttatttccccgtaaaatccaacggactctgtttttattcacatgactattaattgataaataagcgagatggttaatttgttttgttgttaatcctattacctatattaaaagcacgataaatattttgtgtgataatttaatgattaatttgctaataattaattaatccgcatttaattaaaatcaataaaataaattaattcgataaaaacagctaaattagaaataatagctataattattttttatgatataaatcgctgcttatgtaattagattgattaatatatgtaatttcatgcgagaatttaaattaaatacttttaaaaacaaggcgctattgtttctatagtgttggcgcaatgatgtcgaaactcgctatcagcgcactctatatcaccaaaataatgtatttcccgatttgaatcatcccaatttaatttatttgaatgtgaggaagagcttcatggaaaggcgtgcatttctgaaaggagcggcagctctgggtttaacggccggagctgcgtcggtcaatgcggtagaaaatgcgtcattaccgctgacggatgatgttgaaggggcattagcccgtttccgtaaaacggttccagccaattttaattccgattatgttgagaatgcggttatacctttctttctgagtcgtttctatgacggtgaaaaaccgatgttgccgatgattggcctgagtctcagcaagaaaaatgcgctgccctatgatctgtggggattgctgtataaggattggaaaccgacgccatccgaaggagaaaccgtatttttgcaagggctggatgagcgcggagaacataatatgcgtaagcgcatatattattccgcggtgacgcccgatttatatcagccaatgtatcaggaaaaaatcgcggcatttttcgatctgttaatggaaccgcaatttgcggataaaccttttatgcgtcactacgcggatcattatgtcgacgtatattgggatctgcatttaggcgttaaagggcaggcggtaccgcaaaaggttcgtgaagtcggtgagtcttttaatgctgtgctggcctatcgcgatcctcttcaacccattgtctacgaacattatatgagggttcgcagcaatattgattatcttaaacaatggattgatgagcgcgtggatgatattcgaaccggacgcgttgccgaaccgcaaaaaacgctggcctggtattggctaaaaaactccgaaaataacgataatttcagcaagaaagatatcgtttttgagtgtttccataactttgttgctttcaatcaatggggcaaaacgctgtatggcatcatgatgaatctcagcgaaaataatggcgatccggcggtaaaagccgccttcaagaaaaccatgagcggagattatcagaatgccaaagacgcggcctacacgccgttggatctattggttatggagttattccgcactatttcgccaaacgcccgcagtgtttccgttgcagaggatgtgcagcataaagtgtatggcgagcgttttggcctgccgttgaagcgccatagctatatcaacacgcctcataccagcagtaacttcaatccggttcactgggcgcagccggagaaatttgatcctgaacgttatctcaaggtgccgaccagcgcggaaatcaccgaagaagaatgcaagcgtatcggtttggctcgctgcccgttcgatattacctcaatgccggtaaacgatggccgcaatatggcagtgaccaacagcggatttgggacggtatttagcgtcattgatgataaaaaacaaccggtatgtgattacgccggttttgctccctttggtttcagctatcgccgttgtccgggagagcagtttactattcaggttatgggcgaatttttgaccaaagtctggcgggataaaattaccttccataaactggcgttggttaagcccgagagagtgccgatcagtccgcgaacggtgatcgatgacaatatcagtttcagaagatagctatagatactcgtgatgttactggcaaaaaaatgccgctcgttgataagcgagcggcatgagaatcctgaatcagcctgatttagtgggcaccaccgccaccgccaccggaggtaaacggaggacgggcaaaccacactaacaccagtaatagcaggaacaccccagccgacagccagaaaatctcattagccgaaattatcagcccctgattggtaatttcccgtgccagataggccgaggcctgctggtggttcatgcctaacttctccaattcctgataggtctgcaccgaattcgggttatacggattcacaaactccgttaactgggaatggtgcagagactcgcgctgactccagagcgtggtggtgattgaggtaccaatcgatcccgccagcgttcgtaaaaagttagacaaactggacgcggccgccattctttccggcgctaaaccggacagggtaatcgtggtcagtggcataaagaagcaggcaatagcgaaaccttgcacaaactgcggccacgctgacgcgccaaaatccattcccggctcgaatgtatatgcccgccagtagaaacaaactgcatacataatgaagctgaatgtcactagctggcgcatatcgatacgatgagaaaaacgcccgataatcggcgacagtatcactggcaaaatcccgaccggagccgatgctaatccagcccaggtagcggtatagccatagacttcttgcagtaactgtggcagcagtacaatagcgccgaagtacaacatataggccaggctgatacacagacagccaatagtaaagttacgcgatttaaacagcgagaggtcgataaccggatgatcgtcggtcaactcccagacaattaagaaggaaatcgccaccaccgcgacggctgccaagacaataatttcggtggagttaaaccaatccagctctttgccctgatccagcatgatctgcaaggctccgatcccgaccaccaatagcaccaatccgatagtatcgatcggtttgatttcggttttggtttcccgccctttcagggtttgcatcgcgaccagaatcaccacgatcccaattgggatgttgatgaagaagatccagccccagtgatagttatcgctgatataaccgcccagaatcgggccaaatatcggggcgaccacgatggtcatcgaccatagtgccagagccattcctcgcttggcggggggatagttattcagtagcaaactctgcgacagcgggatcaacgggccggcaaccagcccctgaatcacgcggaagaagatcagcatacctaaactattggaaacgccgcatagccaggaggctagcgcgaatagcgcggttgaccacagaaataagcgaacctcaccaattcgtttcgccagccagccggtgatggggatcgagatcgcgttcgccacaccaaacgaggtgataacccaggtgccctgtgagttcgaggatcccagatcgcctgctatggtcggtattgccacgttagcaatggtggaatccagcacctgcatgaaggtcgccagcgagagcgcgaccgtcatccaggcgagtctggagccctctaggggtttttgagccacattagcctccggcgggcttaactggcattcgcctggatcacatcggcaatcatttgattaaccggtgccagatccagagaaagcgcattactttcgaaggcgggttttttacgtacgctttcggccagaaccaatccatcctgattcgccgtatcgacccgaacgacggaagacaaaccgatacgcaacgggtgctctgctagctgtttggcatccagctcgatacgcaccggcaggcgctgtaccactttgatccagttaccggtggcgttttgcgctggcagtaaagagaaggcgctgcctgtccccatatccagaccgaccactttgccctgataaaccacatcgtcgccgtagaaatcagtgactacggtagccggttggccgatacgcatattagccaattgggtttctttgaagttggcgtcgatccacagctcattggcgggaaccacggccatcagcggcgtaccgctggcgatctcagcgccaacttgcacgctgcgacgggaaacgtaaccggtgatcgggctgacaattttggtgcgctgcaacgctaaccaagcgtcacgcatttgcgcggcggcctgctcgatagccggttgtttctccagcggcgtatttaaaaccatggcctgattggcgttaaattgctgtaccgctacgtcgagcgtcgctttggccgcttctaccgcatcgcgggcgtgttgcaattcttctcgaccaatcgcatctgccgcgcccagcacttcacgacgtttaagatcgctttgagcttttttcagttcggtttttcttaactcgatattggcctgatactgcttgccgttaatcacgagctggtgggtttgacgcacgctgttcgccagcgcggtttgtgctctggcaaaagcctgctcagcatcggtggtatcaagagtgaccagtacatcgccgctttttaccaaatcggtattttcgaagttaacgctaacaacgctgccgggcacctgggacataatctgtacctgattaccggaaatataggcattatccgtttcctgatggtgacgcagcaccaggaaccagtaaaccagataagctaccccaataatgataaaaataaccgtcaagagaatcagtatattcttgcgctgcttctttttattttgcggttgtggcggggtttgaatttcctcgcttgcgctcatggtgttctccacgctttatattattttgttgtatgagccatcgctgtcggagcttgatagccgccgcccagtgaacggatcagtccgatcttcgcctgcaataagttattgctggcgctaagttctgcctgttgttgttgcaagaattgtgactggctggtcaatagttcgccgcgtccgataatcccggcttgatagcgagcattggcaacgcgatacacctgttccatcgcggcggaggctgaagcggcttgttgtaactgctgctggctgctctgctggatggtaatggcgtccgccgtttcctgtaccgcatttaaaatagtttggttataggcttcgacagcttcgtcgtataaagccgattcttcaccgagtttgctgcgtagcgcgcctgcgtggaatatcggtagggaaattgccggagcaaagttccatgcctgactggcggcttcgagcagattcgggttagtcccctggaaattggtggtggagaaaccggcaaagccggtgattgataagcttggataaaactcttttttcgccgcctgtactcgctgatcgtaagattcgaccaacaaacgttgagcggtgatatccggccgttgacccagtaaatcggtagtcagctctgcgggaggagataagcgattaatatccggaaggttcacctgacgtaggttttgcgttgcgctcggtccttgcccggtcagggcggccaattgatgttttaattgctcgctctgcgcggttagctggattatttgctgttttacgccgtcagactgcgcctgagtctgctgcggaacttcaacgccgtagatacccgcctgatattgtttctgatgtaacgccacccgacgctgattgttttccacttcctgctgcaatagcttttgcagcgccagatggctttggagctggtaataaaccgaagctactgagctggttagcgttagcgtggcctgttgctgctctgcccgggcagcatcgacctgtgctttagccgcgttgacccgattgcggaatttcccccaccagtcaaactcgtagctcatgtttagccccagcgtattcgctgtttcatacagaggcttgtttggataagcctgcaaaaatggctgaagcgtattttgcgatattttttgtcggttgctgctgccgtacaggtccagatttggcccgttggcagcatctgcctgccccatcacgctttgtgcctcacgtacccgcgccgccgcctgtttcagcgacggtgaggtttgcaggctttgtgtcattaatgcatcaagctggggatcgtccagaacccgccaccactgagagcttatcgccagcgaactggttttcggttgcgccaattgcagttgctggttatccatcatacgagactgaggcgcaatattatcgcttgaggcacagcccgccagtagtaaaacggcgaacaaaggcgtgaccctccagctatgtggggatggcatagttatgttacctggacagagatgtaaggattacaattctggcacttccatttgatccagacgggttaatagcttacgagtcagcttttcaagctgttgctgctcgtcagcatccagtgttgaccagaggaaatgcagacatttatgttgcggcggcaggagttggtttagaaactcttcaccggccttggttaaatgcagatgaaggcaacggcgatcgttatggctttcgcgccgttcgatccaaccttttttctccagctcatcagcaatgcgggtcgcgttggtacgagacgatcctaatgctgcgctcagttctgaaggctgaatgctgtggctttcctgagcatccaaagtaattaatgccatgaacagggtttcgttaatcccttgagctttcaacatcttattgcgattttcgagcaacttgctatgcatatgcatgcacaggcgggtcagcagaatttcctggtaagggaagtccttctgacgtttagcacgaaaattaagcatttgttcaatgggagtaaacgagctttccatgataaagagcctcattaatttcagatgatacagtaacgatagttactaataatgtaaacgctataatacggtaaaactttagcaattagtgttatttcaccgaggtatagcgttgattaatgccaaggatagtagggatatcgcggaattgcccacgttttgaatgcgttatcccatcattagcaatttgaaggttattccgtagctcagagcgccaaataaagtagcgaaaatgatgctcttggttttatagaaataggcgcagatcacgataaatccgaccaaagtagggatgagtttgtgcgcgtcacgcacaatttccggcacgctggaaaccaccagtagggcgcaaatcgaagcaattccgatactatccagcaggagcgaaattttcccgcgttgcagaccggcctgcttgcgcgctgggcccagccgtagcgggagataacggaataaatagttcaccagcccgaccaccacgccgattacgatgacatccgtattcatagctgttgctccttagcctgtttttctgccgcatttgaatctgttaaagacgcagcgggaggctgaattaacgccgccaggcagccaccgcagataccagccagaatcgccaccggaatagagaatacgagtgctcccagcaatgcgccacctagcgaagccaccaccgtcaggctgtattggcgtttaaaggaggcgagcagaaaactcaaaaatagcgctggcagcataaaggacagtgaggcttcaactgccggatagttatctaacggtccgttgccaaatacggcacctaccgctgtgcccaccacccaggacagccaggaggtgaatgagatgcccagcatccagttttcactccagcggcgctgatctttcatcagtttagcggtagcggcagcgaagacttcatcggttaatccgaaggcccacagggcggttttcttaccggatagacgcgccacaatgcggtgttttaacgcggggccatacagaatatggcggacatccattgccattaccgttagggcggaaacccatagggacattcccgcgctcaataatgcggtaatcacgaattggctggcaccggcataaataatgcaggaaaagaaaatgctttccagaggagtaaaccccagcttaactgcgcttaatccaaaggcaaaagctacggggagataaccgatcacgataggaaggctatcggtcacaccttcacgaaaacgggcgatgggttgatcgggggaaagggagtgagttattggctttggcatgatggtagctacgggtcggctcggttaaagggtagaaagcaaatttaaacatttggtaacattaccagagtgttaatactctttgtaccccatatccaaaatttatatctcaatttactatttgcaagctaatcatttaatttttttaaattagctcactggatgatcggccgcagggtcaaatttcttacccattaaccacaccacaatattgagcagacacaatccgcagccggcaatggcaacgccgtaccagcccgcatgttgataggcagcggcagaaaccagcgagcccaatgcgccgccgataaagtaaatggtcatataacctgcggttaagcggttccgcgcttcaggcatcatacggtaaatcacgctttggttagtgacatgcaccgcctgcaccgccagatccaaaatgacgacgccaatgattagcgcgattaacgaatattgccccaaagcgatggggatccatgacagcagcagcaggcccagaccggcgctggtggttagtcgcgctttacctttatccgccaaacgacccgctttgtttgccatcagagcgccagcggcgcccaccagaccgaatagaccgatggtaccttcggaataaccgaaaggaggtgaggccaacaaaaaggccattgaagtccataacacgctgaaattagcgaaagacaaggctcccagcatagcgcgagtgcgtaataccggcgtaccgaaatacagcgcaaaaatagaacttagcaattgcccgtagttcagaccggccttttgtttataacgcggtaggtagcgccacagcaccagcgccatcaccgccattagcacgctggcaacccagaaaatagttcgccagccaccgagggaagccagtgcgccagccacggttcgcgccagtagaatacccagcaataggccactcatgatggtgccgacgacctgaccgcgcttctccggtttggccagggttgcagccaggggaaccagtaactgcgcgaccaccgagaacaaaccggtcagcgcggtgcccacgatcatcatggtcaggttttgcgacatcgccgtaatcagcatgccgccagcggctaacagcgtcatgccgacgatcagaccgcggcgctcaaacatatctcccaacggcactaaaaacatcagcccaacggcatagcccaattgagctgcggtaacgataaatccagcctgattgaccgaaagattaaatgcctgagcaatggtttccagcaacggttgagcgtaatagttactggcgaccgccagaccggtagcgatagacatcagtacgatcaacgcagggcttagcccggcatgttcagttgtttggttcatgaataattctgcttaagatgatgagggcgacagtattggataaatttaaacgataaaccaatgtataattttcatctgattaatctcatttcgagatagataaatgaacctgaagcagattcgttatgcactggcggtggcagaaacccaaagttttactcaggcggcgcaacgttgtcatacggtgcaatcggcgctgagccaccagattgctcgtctggagcaagagttgggttgccagctgtttgaacgtacttcgcggcgggtcagcttaaccgacgccggacaggcttttattctgcccgctcaacgcttgttggcggagcagcaaagcctgatcaatgaagttaatgccgccagcggtaacgtgaccggtactttgactctcggcactatttcaacgctaaatgcctttgatctgacggaaaagattggagaatttaatcgctgttatccggcggtgaatattcggctgtatgttggaatgagtgaaactttgcttgaagacacccgacagcagaaaaccgatgtgtcttttgtcggcatctggccgggggataaaaatacgttgccgctttctcattgtaagctaacggatgagcctctggtggcgctggtggcaccggatcatgttttagccggtaaggccagcgtagacctgcaaacattggctgctgtcccgctggtggatttctacagcggtacgggggcgagacgtcaaaccgatcgcgcttttcagaccgcgggtatcaagcgccacgtcaatttcgagattgatcatattgaatggctggaaaatctggtgcgacgtgggctggcggcggggatcgttcctgtctcgaccgctcagcggctaatttctctggtgtctatcccgatcgacgatgggccgcggcgtcaggtttattgcatctggcatacgccgcttagcgctgccgccgaacgtttcctgcattttagcgggtttaccggacagggtatcgccagcgctgagtaaatctggaaagtccgtaagatgagcggttagattgccagataaaaaaacaggcaccgaaaggcgcctgtctggtttacgtcagcggaggaggtttattgcgcggttttgttattggcagcttcagcggcggtttttacccagccgtcaaaggttgcctgatgcgcggctatccagccattcacatggcgctcaatattcgcatccgatgattcaccggcgtgcattctcatattctgcgcattcacgtcactaatcggtagtttcatgatagagaacagtttggcggcagccggattcgcttccgcccatttcttattggcgacgatgtgcatcacgcttggcggaaaaccgtagttggcaccgttagccagttgggtatcgatgcttttatccggcagggaggagaacggtacttgcagccagattacgtcacgacccggaaccagcacatcgctaacccagtaaggcgtccaggtgtaatacaaaattggcttgccttctttgtaacgggtaatggtatcggcaatcattgccgcatagttgccctgattatgggtgacggtattactcaacccataagcatcaatctgatgattaattggtgcttcacaaccccaacccggattacagccagtcagatcggctttgccatcgttgttggcgtcaaacagcttggcaatcttcggatctttaagctgttcaatattggtaatgtggtatttatccgcagttttcttatcgatcaaatagccctgcgccaagccttcaatataattgccctgacgatagaatttggcatcgccacccgccgctttatattggtcgtcatgcagcggctcccagtttaccgccagaaaagtcgcatcaccggcagcgatagtggcataagccacgttgtaatcaacttccttggtcggttgaacgtcgtagccgagtttttccagcgctttattcaccagcgcggtctggaaggtttcttcggaaatggtgctttgaatgggtaaaacggtcacgcctttgcccggtaattcagcggcggataattgagagctaaccagcgtagtgagagccagtgcccagatgcctgtggtgcgcatgagttgttccttcttagtcttgcccttcatctttcacgccgcagcggtactggctgcaacctgaaatctatcgggcatgagtaaaattgatgacttattaagcccattttagggagagcgcagcgatgggatcgaattggcgtcagccacctgaacgcctttggcgtggtagaaccaagaatctcgcttgaatcccgttccctgtactgcgccgcgattttggctatccatagggtatttatatgatttgtttttaacgctgccgctgggacgattgccattgcggcagcgttaagaacgcaggctatcagcccttgtaacaagctgttatcacgcttttttgataaaaggtttggcgatcagacccagcgggccagtggtgtaccagcggccaacgcctttgctacggcgatctcggcccagagattgagttaggcggtcgaggataatcgccagaataacaatccccacgccaccgacggcagctaatcccatatccagacggccaataccacgcagtaccatttgacctaaaccaccgaccgcaatcatcgaggcaatcaccaccatagacagcgccagcatcagagtctggttaacgccggccataatggtcggcatcgccagcggcaattgcaccttaaacagcaactggcgtggattggcaccaaaggattctgcggcctcgattagatcttccggcacctgtttgatacctaaaatagtcaatcgcactatgggtggcagagcaaagataatggtgacgaccacgcccggcacgttaccgataccgaacagcatcacgattggaaccagatagacaaacgctggtgtagtctgcatcgcatccaataatggcctgataattctggcggcgttattactgcgtgccagccagatcccgaggggcagcccgatcaaaatacagaagaacagcgaagtcagaaccagcgccaacgtaaccatcgcctgtgaccatgcgccgatggcaccgatagcaatcagagacaccagcgttgcgacgcccatccccaaggtagaaaactgccatgcaatcagagcgaaaaccagaatcgcaaccggcgctggcattcccagcaacatgtgctgaaaaccgctcaggataaaatcaaccggaacccgaatgccctgaaataccgggcggaagtgagtcacaacccagtcaataccctgtgtaacccacgagtccagcggcacccacgtgttgtggaatgggtccatcaggctaaaatgctcgggagcgacagcaggcgcgctgtttaaccagtctgcgcctgtttgtgcggtttggttggttgcttcctgagccgccgcgctgccctgagccatgctggcgccccaaggatctgccgcagcagaaagtacctgcggcgcagcatcggtagcggtggtcgacgcctgttgagcaacatcagccgccgtctcccacggattattgataacctgctcgttaacctgtgttgtattactcatttggcgtctccttatctaaggcttgcagcagcatggccttggaaataataccgatatagttgttgtcctcgcccaccaccggaacggcgcaaggggcttgagcaacaagtgaaatcaactcattgagcggcatatcagccggaaccggcgctggctcagccaataaggcatgatcgagcggctggttttctgaaagagcctgtttcaatgaatctatcgataccacgccgataaatttttgcccgcgttccaacacatagccgtaatcgcggtcttcatcctgaagtagttttaacgctgaacgggggccaaatcctggagtcttgcggattaaggccaccggacgacgacgagcaatatcttttgcgctaaatacgtgactaatatcaacgccacggaagaaggttcttacatattcatttgccggattattcaatatttcatccggtgtaccgacctgaacgacttccccgccttgcataatggcaatacggtcgccaatacgcatggcttcgtctaaatcatgggaaataaaaacgatggtacgctgatgcttggcctgcaatttcaccaactcatcctgcatctcagtacgaattaatggatctagcgctgagaaggcctcatccatcaataatatgtccggattgtttgccattgctcgcgctaaaccaacgcgttgacgcataccgccagaaagttcatcgggatatgaataagcataattatccagactgacctgacgtaacgcctctaatgctttttcatggcgttcttttagcgggactccggctaattccataccaaaggctgtattatctaacacattcagatgaggcattaaggcaaatgactggaataccatactgattttatttcgccgaacggtccgtaatgcactgtcagatattttggcaatatcttcaccatcaataaggacttcgccgcgagtaggttctatcagacgattgagaaggcgtaccagggtggatttaccggaacccgataaccccatgatgacgaatatctcgccttcttcaatggccagactggcatctttgacgccaacggacaaaccggttttactaaatatctggtctttattcatgccagattcaatcaatttaaaggcccgatccgggtgctcaccaaatatcttatataaattttttacttcgagtttaattgccatgcagtgggtatattcctctgtcaattcttagattatattttttcctgatgcaaaaatagagcgccatataccctaacatactgagagtctgaggcaaccctcaatattccgataatttatttgatgttgttaatcatgactttatatatgaagtggctcatttgatttagatgcgttaatactggggttgtttgagatgatatcgcaggtaaatataagatattttttatgccaataatgagtgtgaaatgttttctatagagatgataatatggcaatgtttttatcgctgatatagacagatatttgacagatatatcagaggatattgtctttgatgataaacatatattagtgcgattaatctatggataattggcgtggcggaaattgctctcatcccttttgtgctctgggtataagcccaacgagaattttcttggcaaggctgattttgacgtgatttttagctaaacagacggatctgataggcaatttttatactcatagcgaaaggaaatttatcggggcagggtagcgatctgttattacccctcgctaccctccagacagggatctccctgttagtcagaaagaccttcagccgcgttaattttccgggatcaaaaatcccaatcttcatcctctgtcgttaccgcttttccgatgacataagaggaaccggagccagagaagaaatcgtgattttcatcagcatttggcgataatgcagacaaaatggccgggctaactttggcctcgctggctggaaatagcgcttcgtagcccagattcattagcgctttattagcgttatagtgcaggaatttcttcacatcctcgctccagcccacgcaatcgtacaaatcttcggtgtagcgcacttcgttatcgtataaatcctgtagcagatcgaaagcgaagtttttaatttcctgacggcgagcggcatcgaccttttccaaccctttctggaatttgtagccaatatagtagccgtgtaccgcctcatcccgaataatcaggcggatcagatcggcggtattggtcagtttggctcggctggaaaaatacatcggcaaataaaaaccagaatagaataggaacgattccagaaatacgcttgcaaccttcttcttcagcggatcctcgtggcggtaatggcttaggataatctgcgcttttttctgcaacggaccattctcttcactccagcgataagcatcatccacatcagacgtcatgcacagagttgaaaatatcgaactgtaagaacgagcatgtaccgcttccataaagctgatattggaaaataccgcttcttcatgtggggtgattgcatcctgtagtagtgcgggcgccccaacggtattctgaatagtatccagcagcgtcaggccggtgaatacgcgaatggccaactgttgctcttggagcgttagagttgcccaagagggaatatcattcgacagcggaattttttccggcagccagaaattggaggtcagacgattccagacctccagatctttatcatcttctattttgttccagttgatggctttcacgcgggataaaggttgcgtagcgatcatattcttgattccttttataacggcggcctacagtgagcaggagacgcagccttcaacttctgtaccttccaacgccatttggcgcaggcgaatgtaatagatggttttaatacctttcttccaagcatagatctgggctttattaatatcccgcgtggtggcggtatcacggaaaaatagcgttagcgataacccctgatccacatgctgtgttgcttgcgcataggtatcaataattttttccggcccgatttgataggcatcctgataataatcgaggttgtcattggtcatataaggcgcagggtaatacacccggccaatcttgccttctttgcgtatttcaatccgcgatacaattgggtgaatgctagacgtagcgtgattgatataagaaatagaaccagtcggtggtacagcctgtaaattctggttatacagcccgtgctccataactgaatggcgcaaagctgcccaatcatgctgggttggaataggaatccctgcacttgcaaacaatgcctgcacgcgtgaagtttttggctgccagctttgctcaatgtatttggtgaaatagcggccggaagcatactgtgaatcatcaaaacctttaaaacagctgccgcgttcaatggctaattgattcgaggcgcgaatcgcgtgataggcaacggtatagaaatagatattggtgaaatccagtgcttcttcagaaccgtaataaatctgttcgcgagctagataaccgtgcagattcatttgccctaaaccaatagcgtgagattcctgattccctttatcaatagaagaaaccgaacgaatatgactcatatcggaaaccgcagttagcccgcggatggccgtttcgatggtttgcgcgaaattctgcgaatccatggtatgagcaatattcagcgaaccgagattacaagaaatatctttgccaacatgtttgtaactcagatcttcgttatattccgttggctgattaacctgcaagatttcagagcataggttgctcatgttgatccggcctttgatcggattcgctttatttaccgtgtcttcaaacatgatgtagggataaccggattcaaactgaatttcagccagaatctggaaaaattcacgggcgcggattttgcttttgcgaatacgtttgttatccaccatctcacggtatttctcactgacgctgatttctgacataggaacgccataaacctgttcaacgtcataaggcgagaacaaatacatttcctcgttctgcttcgccaattcaaaagtaatatcgggaatcactacgccgagagacagcgttttaatccgcactttctcatcggcgttctcacgtttggtatccagaaaacgcaaaatatccgggtgatgggcatgtagataaacagcgccagcgccctgacgcgcacctaattgattggcataagagaaagcatcttccagcattttcataataggaataacgccagaagactgattttcaattcgtttaattggcgcgcccacttcacgaatgttgctcatcaggaaagcaacgccgccgcctcgtttggataactgtaaagccgagtttaccgcccgcccaatggactccatattatcctcgatgcgcagcaggaagcaggaaaccagttcgccccgttgtttcttgccacagttgaggaaggttggtgtagcaggttgaaaacgaccagaaatcatttcctctaccagatttctcgccagtttttgatcgccggcggctagtgtgagcgccactatacaaatacgatcttcataacgttccagatagcgctggccatcgaaggtttttagcgtatagctggtgtaatacttaaaagcaccgaggaaagtcgggaagcggaattttttagcataggcttgctggaataagcttttaataaagctgaagtcatactgttccagcacttctttttcgtaatagccttcttctatcagataatcgattttttcctgcagactatggaaaaacaccgtgttctgattaacgtgttgcagaaaatattggcgcgcagccagacgatctttatcgaattgaatttgcccatccgcatcgtaaagattgagcatggcgttcagcgagtgataatccagttcgctggttaatggggctgtcattgtgagttctgtcgttgccaaaattcggttactcccttacgaacatttgccacatcttcatcagtacccaacaactcaaagcggtacagataagggacctggcatttgtgggagataatctcgccggccaggcaataggcatcgccaaaattagtgtttcccgcggcgataacgccgcggatcaacgcgcggttatgcggatcattgaggaaacggataacttgaatcggtactgcaccgatcgaactgccgccgccatagctgggcaccagcaaaatgtaaggttgctcaacctttaatttttcccgtgctccggcaatcggaatgcgtatggccggaagccccagtttctccacaaatcggtgggagttctccgatgagctggagaaataaaccagcggattcatcatcgtcacctctgtcagaccgcaacgttttgactcagggcactgattttatccggtcgaaaacccgaccaatgattgtcacccgccacaatgaccggcacttgctgataaccgagggatttaatatggttgagcgcctgggaatcattcgtaagatcaatgacctgatagttaattccatgacgatctaaggcgcgataggttgcattgcactggacacaatcgggcttactgtaaataataatgctcatgattcgcatttaccttttgttttgaggtaaggcggataagtcagaaatgcgaagaacgctcgcggcctgactccctctttatcccccctgacagtattgccctgagcgacaaacaaatactatatgtagagttttattatttcaaccgcactatatgtagttgttttgatgtttttggaatgattagacagcgaagcgccgccagccttgggctagcggcaaactggcgggaataaaaaatatttttccagtaaatggttggaaaaaggctgaaaaaagactactggcgcaagctaacggccaggcggttaaaggcattcatgatgctaatagtaaaggtcagatctgaaatttctgtatcgctaaaatattttttcaataaatcaaaagcgttgtccggcgcaccggttgtcgcgatatgggtaacggattcagcccaggccagtgcagcgcgctcggcatcgttatatgctccgctgacctgccatccggctaacatatcgattttactttggctgacaccgctgtcgcgtagggctttcccgtgcatattcaggcagtaggcacagccgttgatttgtgaaactcgcatgaaaatcagttcaatcagggatttgtcgagagaactattttccagcgtcatcaaggcattcatgagtgcttgataggtggaagaggacagctgagagtaattaagacgttgttcgatcatggaaagtaccttctacaagtgcagtgacgttgagagcgactctaccaaccccatgacctatactatagtggcataacttgattttttttatgggtcatgatgatgagtattcccgttcaattgcaggttgatcgtcagcaaaatgaacctgtttttcgccagatttatctgcgatttaaagaagccataacgcaacgaatactcttgccagacacccgagttccgtcggttcgcgctctggccagcgatctgggcgtagccagaggaacggtagaaaatgcctatgctcaattgattgcagagggctatttacaaagccgagggcaatcagggacttatgtatcagaccaactgccaagggtgaccgctccaatccccgccgagccgtcaaaaccgcggccagccgctaacatcaaccacgcttttgctctggaaacagaaagtccgctaccttttcaactggggctaccagcccttgatgcctttccctatgggctgtgggcgcgaattgttaatcgacaggctcatgccgcgactcgcgcttcattggggcatccgccagctaccggactctcagttttacgcgaggcaattgccagttatctccagctttcccgcggattccattgcttaccggaacaggtttttatctgctccggttatcagtctctgctggatttggcgatatcgacgctgttgcttcccggggatgcggtttggctggaagatccgggctatccggttactcagcagttatgcagagaggcaaagctgcgccacgagccgattccgattgatgcggaagggatgaatctgggtgcagctatagccaaagtgcctgatgccagagctgctattgtcaccccggcacatcaaagtccaacgggcgttgccctgagtctactgcgccgcttggcgctattggagtgggctgctgagcagcagagctggattgtagaggatgattatgacagtgaatttcgctatcaaggtcggccactaccgtcgctaaaaagtctggatcgtcaggggcgggtgctatacgccgggacatttagcaaagtaatgtttccggcattacgtatagcctatttggtggtgcctaaggaattagttgataagtttactcagcgttgtcgattgcgcgcctgtaccgtgccggtgctgattcaatccagcgtggctgaatttattcgtcaagggcatttttaccgacatttgaaacgaatgcggcatttgtatcctgaacggcgggcatggttagtggcggctttggagagccagctaggtgatattttgcaggtcgaagagcaggctggcgggattcagctattggcacgtttggataagaattacagcgatcggctggtggctacgctggcgcatcagcagggattggcgatacaggcactttctgattggcaaatagctatttctggtagcaatggattactgttgggctttaccaatttgcagtcagcagatgacgcgaaaaggcaagtatctcgtttggcatcgattattcggcttatggagagagaatgatgcctaagatcggataaaacaattcgacccacgtccaaaaggcagtgggccgaaaaaagagctatctgctagcctgcgactaacgacgcgacaataatacgccgagcacgacaccgactgcggcaccaataccaacgccctgccagggtttgtcacgaacgtagctgtcggcgttgcccacgacgtctcgtgcatgttgggtcagtgaggtggaaccgctaaagcgcgctctggcatctctcagcacgccttctgcattttgacgaactttttccagctcttctttggttttatcaccggaagagcgcaggacatcatcgagagtatctgccagcagatttacatcttgatcgatatttcgttcaactttctctgatttcttgaacattatgctctccgttttacttagtagacattaagcatagtataactttggctaataaaagccgcttacagaagaatcctaagagctatatcaacagccggcggcaataaaatccccgctggcactaataggaatgactgagctgaacagtaccaaaccaaacagtattaatataaatccgcctattaccgtggcaattcgtgacgcatgaatcagtttccccgccagtaactgaccgtggctagagataaatttttcgcgggcatgataaaccagcgttgcgacgatcattattgatagtgatgtgcccagcgccatgctcattgcggcaataacaccccaggtaaacatgcctactgcattcgcaaaaactaaaatcaggatggcaccgctacaggggcgaatgccaattgaggcgatgacccaaaggtaatttttccaatctccattcagttcttctgctagtggcatatgcttatggccgcagccgcagtcgacttgctgatgggaagaggaggacgctataggcaatttactgatgcctatagcgggaagaggaattatttggtgaatggcgaggcgcttttctttcttataaaggcggaataggctaatgcctgaagcgcgtagcattaagactacgccgaacaacataataaagaccgcactgcctttctcgacaaaatagcggctgaggctcaaatctcccattgagagattaaaaaagactgccagaatcagcacgaacaaaatagcaacaacgccttgcatcatactaccgaggaaagtgattaagcggctggtgttggctttttcgcgattggtagacaaataggtcgtaataacaaacttgccatgcccaggcccgacggcgtgtaaaaaaccgtaggtaaagctaaacagaaccagcatcagcccggctccgttctgattattttgttgctgaagcagatacatcactagataacgatgcatatatatctgtaggttaatgcaatattgaacaaaatcagaccaatgccagataagggtggctaatagagctgtcattagcagagcggtcagcatagcgccggcgactgaggttcgcgtaagtttaatgttcgcaatcatgatggggtgatccctgctattgatatcaacaggtggtaaatcctgtttttcccttgctccgccgcattttacccagaggatacagtgagacgagctgcactgaattattattactacatataagttatggcggataaatattgtcgacgaattttgcttttgtaaaagaatatatcgtctgttagatgctcgatgaagcgtgaaaatcagcattagtgccaggttgtacatttggttacttaacgaaaccaatgactcacggaaaggaaaaatagcttcctctatgattctttcaacggcccgacagggcttagcgaaacaaactctgaggaattacaaatgaaaaaagtattagcgctgatcgttgctgcaactatgggtatgtcttctgttgctttcgctgctgaaacagctgctgcaccagcgcctgttgctactggtaccaccgctgcggctcctgcggcagagaaagcggctccggccaaggcaaccagccacaaaaaacatcaagcgaccaagaaaaccactgaacaaaaagcacaggccgctaaaaaacatgagaaaaaagcaccggctcagaaagcacaggccgctaaaaaacacgagaaaaaagcaccggctcagaaagcgcaggctgctaaaaaacacgtaaaaaaagctccggctcagaaagcacaagccgcgaaaaaacaccacaaatcagctaagaaagccgccgttgctccagcagcaactccagcagcataagcacttctgattacagttgtctccaggtttgccaaacctcaacacccggttcttccgggtgtttttcgtttctatccgctgggaatgattcaaataccgaataggttacctgctttcctttgagatcgttaccgtccgaattttcatctcccgcggatattatcccgccaaagtctcgtgtaaatgccgccacagcagtttgccgtccgttgttttatcgaaaatcgccgttgataaacgacgatgtatcggttgatgaggcattttttgctgttccagataactgaccactgcgccttgcgagttttcctgaatcagtgtcatttcggaaagacgaatagttaaccccggcttagccgcagactgtgcccgaaaaaagtggcatagagcggaataatccaacgagtgaccggtcagggtgatcatggtgtactggggtgaaaagtccccgagtaaatgctcacaaacctccgggcaagtatcgctaccgctaaaccactgttcgataagctggtgggtgctgctgatgagaccaaaataggggttggcgttattcatattgattcctgtttgatgaaggcttaacgattgcgtaaatcacgtaaaatagacgtattagtcatacggctggatagccataggggtaataaagccgatgttgccgcgagtaaaaaacaccagtgaaaagcctgcgttgctggctggcgtagcgcggggttatccagtgcgccaacgccttttagcgccaacattaaattgagtagcaggctaagtaaggcaacgccaaagccgaagcccatttgtcgattgatgttccaaagtgcgctggcatcggccaaatgacgtgtttctgtatgcaaaaaagcggtgctttgtgcggtacagctgcacaagctgccgccaaaccccatacaggcaaaggcgatgaacatcgatggcagttgttccgcctgaacgatgttggttagtagtaacataccaatcccttgtgtcagacaaccgcagataaacagtggtcttggcccgattcggttaaagatttttcccgttaaagtaatggcaataaaagccgcaatggaccagggaatcatcagtaatccaacctgtgaggcactcatccccaatatattttgtaggtacagcatggtaatcatgctaacgccgatgaaaataccgggaataaacagataaaccagcattgagatacgcatcagcggctctttaatcaaactcaaattaagaattggctgagaatgagccacactgtgacgaataaaccccctcaacatgataaggcctaaaaccactaacagagcgccagaaattccgtgttctggttcactcaaacggcttaatcccagtagtaatagaattaataccgccgaacctgaacataaacctgcgatatccaacggcgattgttcggttttcctttcctctggttttaaccagataatggagagagtgagtgctaacagcgcaaggggcagattaagataaaatatccaacgccagcctaaggcatcgacaatcaagccgccaaccgccggtgatagcgccggagctaacaggccaaccaacataatgacggaagagagaccggctcgttcatcgggacgataatattgataagttaacgtctgacctatcggaattaataagcctccgccaaatccttgtaatactcgccatacgatcaataactcgatagaacctgcggttccggctgcggcggtagcaagtaaaaataacagtaaagaaagtaggaaggtacgccgtgcacctaccgttttggtcagccaggcgctcaagggaataaccagagtcagccccagaatatagcccgtgcttacccaggctaattgactgatactggcgtgcaaactgcgggcgatatccggataagccacattggcgataaacatgttaatcagatcaacaaaaaatccgagtaaatagacgattgcaactttagtacggtatgccattggagcctccgattgaaggcggggagtgtatctccgaggctatggctgataaatccgcacaatgcgattacactggtaaaaattttttgacaatctgggcggcaatgcatggtcagtttgcatcgattgggtacttttgttgcggtagtgaatgcggggtcattcactgcggcggcagatattttagggcagacgcgtgcggtggtgagcttcaatatcaagcaattagaagctgagcttggcgttgctttactgattcggacgacgcgtcgcctggcggtgacggaggtaggcgaacgtttttatcagcattgccagcgtttgttacaagatgctgaatttgcagtagaagatgcccgacgcggccacggtactctcagcggaactttacgtattactactacgccggaatacggtattcgtactttggttcctattatggcggcctttatgcgccagcatccgcatttgaccatccagcatgcttgttcttcgcagcatgccaatctgatctctgaacgttttgatgtggctattcgccttggacaactggttgattccagctatcgagccgcattgatcgaaacattccctatattacctgtggcttcaccgatgtatttacgtagtcacaaaataagttgtttagaggatttgcggcaggcgcagtgggttgcccatagccgtcttgccacgccgttgacgtggcaggtacaagggccggataacggctggcaactgttggatgttaccgagcagcctaaagttttggccgatacctcggcttcactacaggtatttgcccgaaaaggtgcgggcatcgcgttgttaccggaatggctggtggcggaggatttagtcagcgggctgttgcagcaggtattgcctcagtatcgttttccggagcagggggtttatgccctgtatcctaatactcagcatgtatcggaaaaagtcagggcatttatcgattttcttcgccttagcgtaaaaatgaagtcagcttaaaagccaaaagttttaccaagcatgaaacgtagatcgccacacagtcattgcctttggcgcagcaaaaccactctccatgtagactattctgaaataacctgtttgaggcaataaataggttatttcccttatttattgcggtaaggtcgctccaattgctgtcggaaggagggataataaatgtatttaagaccagatgaagtggcgaaagtcctggaaaactctgggtttgagcgagattatgtggtcgaacaggcctatggctatcgaaagggcattcactatgtgtatgttaatcgggaagcacgcatggggagaactgcactggttatccatcctgcgctgaaagatagaagtctgctgtttgccacgcctaccgctcccattcgtatcagtgataagtaccatgagtttccgctctatctggcgggagaggccgaagagcgttatggtatttctcacggtttcagttcgcgggaattactgcaacgctacctgcatagcatgttccaatagctttatacttcaatgacttttttgccctaatcggcagaaatagcctcaagcaaaaatctggcgcgccgtatccatccaatcaatgcaatacggcgtctgattcctggttgaaattcatattgtaggtgcgcctgaattgagccagttcgaaggcgtctatatccaattcagcaaaatagaacaaagcggcttctgtatgctctgaagttagcgttggcggaatatgcgcccgcagcaacgtattgcgccattgcgccacgttttcatcggaagcgtctttgataaaagtttgataaataaaaataagataggcagcttttcgcacatcctcagcataaccattgctgatggatcggataaacatttgcgtttgacggtttcccatttcttgcagcatcgattcgatataaatcggttttatcttcaacaaagtagctaaagtatctacggtttttcgtgtatcagacgttaagactcggtaacccacaataaaaactacaatgagtacagcaatgattatccatgtcattattatatctttcatcaacttagaataattaatcgagtagcattctcgtcgcaaatctgaccttttggcaaagcttagcgatgttcgccgccaaaatttccttgagattgctgcacagagttcaaatgacggttaaaagaagcggcgtctttggctaatgcatcgagatgtgcgcctaacattttgatttgctttactagctgatgttgttccggcaacgaattagcctggctcaactttttcagcagtaaatcattttgtgtttttaggattgcttcacgggcttttgactgttccaaggcgtgttgcaacgcttcatagctttcctgccatacctgatgctgtttctcgaacgttgactgcaactcattcattgcactaagaaacttcacttccagctcgcgcattgtcattgtttctcccttggcatatcccgattatcattggcagtataactaaatctccccttaacctcatccgctagaatttatctcaccttgcacttagctgaatgggttactcgaaaccagcgagtatagatatttatcataaatcggtgctttggatgtggtttactttttacccatgggttatgcctttgggaaataagtcttgctataaaaaggctgccgtgcgttaataagcgcatcggtttgtaacacagacctatttatgtaagccatttaagtaaagcagttcctagttaaagcgatatttttagacatcacttctccgacgaatttccttctttagtgcccccataagtaattactgataagcagacctctttgccatatgttggctcaaaaaataatgaaggaaatacccctatgtctactaaaatgactggtttagttaaatggtttgatgctggtaaaggttttggttttatttctcctgctgacggcagcaaagatgtattcgtacatttttctgcaatccagagcagcgattataaaactttggacgaaggccagaacgttgagttcagcatcgaacaaggccaaaaaggcccttcagcggttaacgttgttgcgctgtaagtaaacccagcttaggctgcgtttatagttgggaaattgcgatagcgatgatggccatgccggagcagacaatttagttctcgatgagaataccaacaccttgagacctcgctacggcggggttttttgttttatggatattagtgattacgtgttaccccgccatatttatccttttctgaattcttagtgaaaaaactcgatctatattgtgattaggataaatgcatactcagttatcttttttatattcagacattagccacgttcgaaaaagtagaatatattcgaaagcgattgtttaatcgccagcgggctgcttggtataagtacagtctacgcacctgcgggtgcacgatttttacgttatggatatatcaacattttcactgtgtaagggagtagggcgtgaactggaatgaaatagcaatatcagcggtaataggcgctgtattggcaggcgtggcttcgctgttaaagaaaaatggaaagataggtaagttttctggagttatgttggttatcatccctattataattggtaattttttttattataagtatattaaccagaatatcgatcgtgctgaagtggaatattctctagggaaatttgctgtttaccaaacaataaagcagcaagaccctacgctatatactaatctggttaaccgtctggttgccttaaaatctggcggtagctcagaacaagacattattgatgaaattaagcaatcggtcgccttgctgacggtaagtaaaattcaaagcgctccggataagaatgttgttgaatatatgaacattattctggatgagcttcatttttatcaggaaaatgacaaaactcatcagctttgctacaaagcgctttatccacaggttgaaggcggcgttaatacggtaaaagaattacccgccactttagtacaacgcgatctggaagcgttgaacaacctgtttacagcatcaaccggaaagccaataaaaccagagaatgagcaatataaaagccaactggaagccattgtgcagaaattgcatcagaaatatggtgatgatttactgatgctgagtaatccgaccgctgccaatgtggaccgtaaaaaggtctgcgatatggctgttgagctatacggcaatgtattgcgattgccacaaaaagaagctggaactatcatcagaacgatgctggcaggcgaatagaaccgagacagtgaaacagccaattgctttacagacaggtaacaagccattggctgggaatatcattttacggggtagttgacgaaaattaatcgtgatattttttaattaaataattacggttaatcataaagttagaatgttaattatcacgttatctgataaagactccccatactgattgagatacagataatcttaatcagtatggggctatatacctcaatttttgatgtgaaacatacctaatatccatttgataatttctaatattgatttgtgaattgtgagattattctgaatgcaaatcaatcatttcaagacagatgtctaatgtattgcttcttgcctaatggctaataaaagacataaaactataccttaatccaaatttatcggttttactgctgattaattattgaacttatatccgctgagttagtgtcactattttttaataattaaaataatcacaataagacgtaacattaatgttatattaatctggaaaagttgaagtttgactgattccctactaatgctgtgtatattttttgttatctaaaatcatagtgagcaaaaatagttattcattttgtcattagtggaatttagcttcaccaccaggtcacagacttaaattttcacctgcatagattaaaaaacaaacaaatagagatgtaattcaatgagaaaactactcgtcataattttctgtttgaacttgtttgccgtaaccaaacaagccgcagcagaagatggaaaaaccgtagatgttgtattaatcggcggcggtatcatgagtgcaacgctaggcacctatattcaagagcttgagccaacatggtcaatcgatatgttcgagcgtttggatagcgtagccagcgaaagctcaaatggctggaataacgccggtactggccactctgcattagctgaaatgaactacacgccagaaaaagacgatggttctattgaaacagcgaaagctattgagattaatgaagctttccagatttctcgtcagttctgggcctatcaggtaaaaaataacgtcctgcacgatccccgttcatttattaatagcgttccgcatatgagttttgtatggggtgacgataacgttaatttcctacgcaaacgccacgcagccttacagcaaagtacgttattccacggtatggaatattctgaagatgctgagcaaattaaaaaatggatacctttggtaatggaagggcgcgatcctaaacaaaagatcgccgctacccggatgccaattggtaccgatgtaaactttggtgagattactcatcagttagttgatgcattgtcgaaaagcgataatttctccctaagtctgggtcatgaagttcgtgatattaaacgtaatgcggataagacctggagtgttaccgttgccgatctaaaaaatgatggcaaagaacgtacggtgaaggccaaattcgtctttattggtgccggtggcgcatcattgccattactgcaaaagtcagaaattccggaagcagataattacggcggtttcccggtgggcggcgaattcctggttaccgataatccggaaattgtgcagcgtcatttagccaaggtatacggcaaagcggctgttggttcgcctccaatgtctgtcccgcatttagatacccgtatgctggatggtaaacgcgtgctgctgtttggaccctttgctactttctccagtaaattcctgaaaaatggttctctgtgggatttattcggtactatgaccttctctaatatcatgccgatgacccatgtaggcatagataatttcgacctggttaaatacttaatcagccaggtaatgctaagtgatgaagatcgttttgaagcgctgaaagaatatttcccggaagcgaagcaagaagattggaaactgtggattgccggtcaacgcgtacaaatcatcaaaaaagatgaagagaaaggcggcgttctgcgtctgggtactgaagtggtcacctctcaggatgggactattgccgcattgctgggcgcatcaccgggggcttcaaccgctgcgccaattatgttgcacctgcttgaaaccaccttcaaagataaagtggcttctgaagcgtggcaggctaaattaaagcaaattattccatcttatggccagaaattgaatggcaacgtggaaatgaccaatgaaattctgggctataccagcaccgtattgcagttggataatttagcgccgcagccagtggttgaagctgaagttaaaaccgaaatgaaactggaacccgtggccgaagctgtccactgattggttttaaacgtaccaatgatgctagccggagagcgatcgtttctccggcttttttatatcaaaaataggctgattcttttccttttcatgctgattgaggcgagtttccctcagatattctgcggattaaatttacccaaggctacacaaagcataaactgcggtaagaaaaaaattgcattgttacgcggtaaaataaaataatactcaccggtcatctatcaatagaaaggaatcttatgtctggtattttatttaaaactctctcggtattgtccttgagttttctcccgctgcaatcatttgcggatattgcggtaatcaaaaaaaacaatatcaaaccgggcaatatagaatatgccaaggtgctgtactccggcgatgtgacggaaaataagaccgtagaattcatctctgttctcgatgaaatcaatgctaattacccaaaactgaaaaaaatctatgtctacatcaatagttatggtggtgatatggacagtggctatatggcttatgaggcgattaaaagctcaccggtcccggttactacggtgaatttatctatggtcggttcctctgcaaccttattttactgcgctggtgcggaacgtctatcaatgaaaggagcttctttcctgctgcaccctgccgccgtggctaatgaaaacagcaacttcctcaagcctgacgcactaaaaaatatgcaagaggcggtgagtatatataacaatatgttcgatacggtttataaagaatgtaccacttacaccgatgctgagcggaaaaatattctttatagtgaaaatggtcgcgctttgatcaattcgggcaccgcgatagataaaaagatagctaacgggcttgccaacggattttctgatgttcagatatcttattacattactgaaaaacccaatcagtaatagtgcttaaggcttcaatgataaaagagagcgctatagctctcttttatttccctgccggggtagatttgtcgcgagagtattagggaaacgacctcgatttcagcgttgtattatttggctaattctcgttgatagcgtggtacagcattcccgacgcaatttataaacataaaacccgccgatatctgcaccaatgatatcctctaagtattgactactatattccagcgcagcccctgaactcaggcataaatatctttctcactgccagtactggggcgttcccctgccgaagaccgtttcttaaatgcactcttaatgcatcctcttcgttataaaaagaagtggctacagcctgataagataataagagaaccaatcccaataatatatttattttctgagattttccctctggaatattatccaaatatatagggtttctgcgttcggaatttctggccactccttattatcagagtggccttttggctttaaagggcgtttttaactaaagaacctgcgccgatttctgcaatatttctcgctccggtgagcgtcatcgctacgcgcatttctttatcgaatagctccagcaaattagcgacaccggcttcaccggcggcagccaaagcataaacaaaagcgcggcccagcatcacgctgtcagctcccagcgcaatcattcgaaccacgtccagaccgctgcgaattcccgaatctgcgaatattttcagatcgccttttaccgcgtcagcaatggctggcagagcatgggcggtagaaagtacgccgtccaactggcggccaccatggttggaaaccacgataccatcggcaccaaatcgaaccgcgtctttggcatcctccgcatcgagaatacctttaataatcatagggccttgccagaattctcgaatccactccagatctttccatgaaattgaaggatcgaaattagtcccaatccagccgatataatcttccagattggtcggcgtaccgcgataggccgatacgttgcccaaatcgtgcggtttgccgcatattccgacgtcccatgcccattgcggatgagtcatggcctgcaaaatacggcgggctgccgcatttgggccgctcatgccggaatgagcatcgcggtaccgcgagccaggaaccggcatatctacggtaaatactagcgttttcactccggcagctttggctcgttcaagcgcattccgcataaaaccacggtcttttaagacgtaaagctggaaccacataggccgatctatagccggtgccacttcttctatcgggcaaaccgaaacggtggatagggtaaatgggatcccttttttagccgccgctcgtgccgcctgcacttcgccacggcgtgcatacatgccggttaaaccaaccggtgccaaaacaaccggcattgacaaagtttcatcgaataatctggtttccagactcagctcggacatgttttttaacacgcgctgccgcagtgcaataccggctaaatcttcggtattacgccttaacgtatgctccgcgttggctccaccgtcaatatagtggaacagaaaaggcggaagtttagcctgtgctgcggcccggtaatcggttgaagcggagataatcatgatctgtaccttagtttgaaacgttaacttaatttttactctcagggagccagaatcactgccattcctgcggctatcgcaccgtaaaccagcatgggcagaagcgtttttttgatgattttcccctcggcgttactgaggcctaaaatcgaacaaacggcgataatattgttcaggcacaccatattacccatggctccacctacggattgtagtgccagggttagattgacattcagcccgctgctcagcgctatggattgctgaatcccgccgaaagtcaggttagacacggtgttcgaaccggagaaaaacgaacctaacgccccaaggaatgaagagaacatgagccaactctcgccggtaatagctgctaactctttaccaattaaaatgacgggagcgttgtcaccgcccagcatcatcatattgaccattaccagcgcaccgaagagggcaataaacggtttggatatccgtgatgcggtttcgctaaacatatgtttaacctgtgtgccgctcagcctaaatagcggaatacacagcagaaccactaacaggaaaggtatcagcgccgggacatacagggttttgtaacccgcagctgcagaggttcccagcacttgttgtaagttgataatcaatgccttactgatgcttagctcacctagccagcctaagctgccttgccatagcgtagccgtattattgagtaacgcttttagccctagctgatgaatgcgggtgacaatcaaaatggcaatgagtagcaaggtcggtgtcatggctttgatcacctgcaagaaaggaactgccgttgccgtatcttttctatccgttcgggttagcccgattcccatacgtgccaacaatactgaaagcgctagaccaatagctccgcctatcaatgcggggaattcatagttaacttgcgctagcagtaggtagggaagagtgcagctcaatacgctgagatagatgaaaatcaggttgccgcgaatttgctgccaagaaacgataaaacgtaatgccagcaatgggatgacaaaagcggcgacaaaatgaatcagtgcggtttgacggccgatttccagcaggctttcatcggaaagaccgaggttagcgaagccgaaccaggtaggcgtgccgacggcaccgaatgataccggcaccgagttcataatcagcgtcaataaggctacgcgtagagggttgaatcccagcccaaccagtattggtgccgcgatggcagccggtgtgccaaatccgctggcaccttcaatcatgaatgcaaatgcccagccgataatcatcagctgagcaactgggttagggctgatattttccagccagttacgtaccacgttttctgcgccgctaacctgcatcagcttattcaacaaaattgcgccagcaataatggtgataggggtaaatacggaaactagcgcggtaataatattggcgtgcagcaacagcggcgcgctgttgaaccagaataattgcacgcaataaaccacgacggcggtcagtggcagagcgatataggatgggattccgttacgcctggtcatcatccaaatcaacagaacgattggagaaatactaaaaaaaagggacatatcatcctcagggttattatttttttagatggatagagatgtagccaaaaggttaattagctaaacattattattctaatcgcaacctttgcagatgtactacgctgcattttcgcaacaattaattagtgtgaaatttaggcataattcaacaatccattcaggaaatttattttcaaataacttttaataatcagattgttagattgtttgttttgtgtgaggaatgtgttggttcacattaattaggcaggattaggccatagactatatccaaaaatggcctaatcatcggggggaatctagcgggaaaatggggtaatcagatgatattttcaaaaatagtggctgatattcttataggaagtaatgatatgctcgatgagcaggcgggttttcaacggtaaattacgggtataaggataaactgcataaacgcccaaaactttaccgcagtggccagccagaatttcgatcaattttccgtcctgaatatcttcatacaccatacaacgcggcaccatagcaatgccgtgaccgctgataacggcttttcgaatggctctggcattatttactgacagatttccattcacctgcatttcatagatttcgctgctaccgggttgtttcattaaccagttggctgtaccactttcctgataggtgtaagtcagacaattatgattaagcaattccttcgccgaacgaggttctggatgcagctccaaataaccgggtgaacagacaatgacccagcgagaatcgagaataggacgcgcaatcaggctggagtcaggcatggtgccggtgcgaatagccagatcgataccttcgttgaccagatcgacaaagcggttttccagccgcatttcaatcttcaaattaggatgttggctacaaaactcggccacgcattcgctcagcagtaattctccagaaatagtgggtactgacatacgaataacgccagctaactcatcacttttttcactgaccgcatacaaagcatcctgaattttggtgctgatttcgcgtgcatggcgatacaacacctgaccattttcggtaagtcgcaggctgcgcgtggtgcgataaagcaggcgggcacctaaagatttctccagacggccgatacgtttactgaccacggaactggtgataccggcggcttcggctgctttactaaacgaaccgcaatcgacaattaatacaaaaagaatcagatcgttggcatattcgtgagtgggtaacatagcgtcctattcttctgtggctccactgattgacacagtgtaagacctcttggtcaggaagcaatatgcattggttatttggttgaggtgataggtaaagcctgtggtgttcaatatctgtatgattttattaaaccaggtgtgtaagaaaaataatggtaataatcttttaaattacattcaacaaacttaggctggtcatagtaattacatcgctattttttatttcttaaccgaaagcatataagccataatttaactttactcgctttaaatatcatattaacttactccacctatgatgttaatcattaggataatttccatgtgagaattaaaaaatcatatctgtaatgagcatttccatcttcaagcagttttctcgtgagaaaacaagcatatctctggttgagttcttggttatatcctttgtaataacaggagtgaggctgtatttttttcgtgttatcggaaaataataaagcatcgagaaaatttttctgttggatttctttcacaatcagatctttattgatgtcatcatgttttaatccagtcgtctttttcatatcatgaataaaggttctagcactgtcatcagcaacattaattgtctggcggcctgaagccgtaattccagatagctgtaacccccccaagggccaaatttagcgatataggtaatcttcttgttcaatctggccagtctggcggtgggatcatcggctggtcgatatttttataccttattgatttatggcttatatagaatagaaccgcatgacctccgataaatcgggataattgagacctatcactaatattatctgatggcgaacaccgcgtagcgaacagagaggaggggactaaattctgtttttggcgaaaataagcgtcaaatgatacttttttcgccgggttttgggttgtctgaattgtattaaaactgccgtcacagccgtgactatcgccggacagtggaataaaaacgttcccgctgcctaaacatcgagtgatctactgtctgtattattcaattctgactcggaaataatatattggattagctgatgtaaattagttattttctgagatgtcaataactcgggttttaactcaatattataatctttttgtatattgaattgaaactctacaaaatcgaggctatcaaagccaagttgcctgaaatcagcattcggagtaatttgatcttcctccagatctttcatggtaagaatccaatctttcatcgtttcaaaaacctgattttcattaaacatagcttgtccttttaatggtttataatttaagtgttattatttagactgaatttgaattcctatatctgactgcataacaaattgtccattgataatgactttaagttgaaataaagaagaaataatattttgagaagagctaatcataatcggttgacataatctaaatcgaatgttgagagaggaatccaggcctgatattttcactttaaagaagtcgggtgcaaccaaaaccctatgggtggtttgtaatactctcagttcagcgaatagatcgctttgctgctttatttgtgggttattaagtaaatggcaaatgttaacaaacagaaattcactctgcgaaaaacgagtgaaaacaagagagtccataaaaagccacgcagagtcgaaataggggtatgtggtttcgaataatgcttttttctcctcatatagcgagtgttcaatgagaacatcttctggggaatattctgtgattttctccatgggatgcgttttataccggctgcccgtaatagcttcacaagatctatcttcagagaataagagaaagtaatcacgctgatttttcttttttattgccaattcataatgaagtttttgtaataccggtgaacggaataaagtttttatcgcaacccaatcttggttcggttgtatatcatctagacttaaacgatgttggatatgcattaaagctaacattccatgggcgacaatattcgcagaacccattgcctgagcgtgagataagctaaagtgaataggattatagtcacctgaataatcggcccagtctgcaatagcttgttcatcgaagtagagcttcatatcaacggaacctctcaatgactagcacggcattggccccgccaaaaccgaaacttaggtttagtgttgtatccacgggactgttctttttatgcgtcagcggtaagtaattcagatcgcataagggatcgggctcgattaaattgactgtggctggcaatatctcggtttcaatcgctttcaggcagataattgactcaaagctacctgcggctgaaatcaaatggcctgagtaacctttcgtactggaaatagggatatcgtaagcggcctgtttaaatacggctttaatcgtattggattcattgaggtcatttagctgtgttgaggttccgtgggcattaatatagttaatctcggttggcgatcgaccagcttgctgtaatgcaaataacattgaatcaattcgtgcttgcatgtctgtagccggggaggtgtaatccgtggcatcggaaaaattgccgtaacccgtaatttcgccgagaattttagccccacggttttgagcatgttccaattcttccaggcaaagcactgctgccccttcggccagtacaaaacccgaacgacgacgatcaaatgggcagcaggcacgacgaatatcgctctgctctctgctaagcgcattcagtgcatcaatattccaaatatttgtttcatgacgtaatgtttctgaaccgccagcgagcatcatttgagcgcgtccctggcggattgcttcataggcttcgcctattgcaatagaaccagtggcgcaggctgcacttatcgtattttgataaccccgcatattccacattaacgtacaggccgcggtggcaatactgggcattgagatcagcgtgcctaatggattaccaaagcccgtatcacgataactatcgcgtagaatatatgcttcatctaacccgccccaaccggtgccaatgatggctccgcattcgcgagccgcgtagtattcggctatggcttcaggttgtttaaacgccataagaattgcttcataggctgcaaccaatgcatttttggcaaaaacaggcagtgcgcgggaaatacgtttaggaataaaaccatagcgttcattatattcaggtaaaaatgcaaagaatttagctttaattaacggattcttaaatgcgtagggtttatagcctaaattcccgttcataatagatgaccatacggttgcgctattttcccccaaagaagttaaagccccataaccggttaccactactctccttttgttcatgccaatacctctaattaatatattaggcggaaatggatatatgccttgaaataatcaaggcataaaataaccactatcggttgctaataaccacatcttgattatttattgtacgaagggagaattgatgcagattaccaaagttatcaataatatcaacagatacctggccattaataataatgttctggttgttcctattattgtaatagttaattgcacgaatatcgccatgtccatgacgtaaattaactaatgcagaagagttatcggatcttatctcattaacacgaaggcttgttctatttctagccatccagccgctggtataacggcccgaatcgaagaatatcctcaagttattacgtaaagtagtattaccagaattaaacgctgtatccgaatggaccctgactcctgaaggtaatgtccaataatacacatcgacctgcgcccaatgccctttagaatcactacgtgaatggccaatatcaacatctctatttagcgcagaggcgagaattcttaatggtggcacgggaaggagagaaatagagctcgaaaaaaccataccatcagcattaaaactagtcgtaataacccggcgttgaagttgattattggcgtcacggaactggatagtcactgcagccataaatattcttgtttctacccgttgatttgatcgcaaataccggaatatacgcgtggcacctgcgaaaggttcggggccagatcgttcggtattattatcgatttctctatccatctcttcgtacgaaagtcctcttataccttgcgaatagccgttgggagcctgatcaacatcccaaccgactggcaggttgtcccgattaatttcgcgaacggtgacgctccttttttcttcatcattgagatcgacattattccaaccgctcccgctgaattcctgtttttgaatcgtgatcaaaactggcatttgttgacgaccgttagcataaaactgattactgccgggtaaagtgatcgtaaactgactaatattcacattattcattttaaaccccgatattaatctttgaaaactgagaagccataaaatggcggtgagatttcctttatcatgtcgactttaactctgtccgttaatttttggtcggcattgaatacttgatgctcaataaaattactgaactgactatctgactcaaaaaaatactgattagcgctagggtaattttcaaaataaactttaactgctaactgcagcatttttgcaaactctatattttcataattgaatctgcttttatctaatacgcagatctcagcgaagccttcttccggggtggttcctccaaaccaaatagaaataaatctatgatctattttaggtatgaaataatatccatccccatcagttgaaaaattatcattaaaaaatacttcttctctgaagtgtgaaggataaacaaattcaataataattttatcgccattgaccattatagggacgcattctctaccactagataaagcatgcacctgtccatgccaattagagttatcggctgctctgaaaatggaattaataatgttcttatcaataaatctcatagatactcctgataataaattaaatataagcctgtattataaaaatacaggctgactggataagctaatcatgcataaataaaagtgatgccaataatcaatatggagatataaaaatagaatatctaggtgctgcattgttttagcttgggagataacaaattaaacttatatagaataaacctcttcaatagccgaagctcggattcggcctacgtggttatcaaattcagtataatattcatgtgcgctggccagcgatccttgcatagtatcaattgcgggtaaaaacggattacttcgtacttcggcatttaaattactcgatgaagaaggtgaggttgttgccaggtcgtgtgaagtattggcaatatcgaaaattgtaagagggatagaagcgacgcctgctacggttcctacgactctagcgaataatcctaatgaactatcgtaattagctaatgcttttaaaccttcgaaaagtcccatgcgggcggcaactgaagtagatgaaattcctgaaaatgtgatgcgttcggcgccgctacctgtggagaaaagaatggtaggcgaacgagcggtctggtaggtgcttcgcaccgttgctcccgctgaacctaagccagaaacaaaagatagcacgccaaatgttagcgatgcgatgcttaggcgttgtattgtgtcacttcgatcccatccggcacgagcatcgacttcttccattgccgccgctgcaattgccagggtgctgctgactattcctaatgcgccgccagtcacgccaagaaccgtggctacggttgcccctgctgccgcaaagccgaccaaagcataaccaaaagtcagaacggtaagtgcagtaccgatgccaattaatagccaggttagccatctcggcatttgaatcagtccactgggatctctgaaattgatgggatcgccgttgcaataaccgtaactattaatacctgctgcactgaatggacttaatgggtcaggtgaaaggaaaatcattagctccggactataaactcttcgtccattgcccaaatgatagagttgagtcattggatccagcttttcgccattgaacgccgggcgactctgctctagcaatgaaatatccagattatctgaatcaattatcgccatgccgtaaggggaataatgggtctgtttaatatcattactctgcccgagagcccctcgaatactggcggcgctgtcgctaatatataattcagtgccttgagtactggtcgtgcgcgccagcacattttcttcctgcctgacaaaacgagacgtgttatttccctggctggcgccaataattctattctcgctataatggaatgctactgtcgtattagcgttggcgctttgttttatttgacgcccctcagcgtcatagtgatagcgagaaatatgactttcattttcagtaacattaattaaacgctctagttcatcataatgataatttcttttaccatcgctgagtaaattaccggaagcatcatagtttaggtgtagtacttttgatggattggtatggcgtatttcagttagctgagtggggtcgcgtccctgaaaactacgggtagaaatatcctcagtaccatctgtaaattggctgataacctgcgttatattatttaacgcgtcataggtaaaggcctgatattgaagactacgcccattttgatctttagaatattcagggccgctgcatgaataggtgattaatctgcggtaggcatcataaaggtaagtctcaccaataatagcgataccttgggcgtttgtgagcatcttggaagcaatcaggccattttggtgataggtggtagttatggtttgtagcaatgcgccattgtgttcgatacgtcggatagattctcgcccagcctcgtcataagtcacccccgttataacattgccctgctgagcagaggtatccacgcggctaattcgactaaaacggtcataatgtgttgtaagatgtaccgaacctacgctggctttttcaattcgacctgcggtgtcataactgcgcatttctttatctcgcagagccgaatcagcggtaattaagcgaccggcaggagaatattgatagttattggcgtggctttgattatcgaataactgtgtatctttattgagatggccgtacgtatcgaaatgtaattcgcgcttaaattcgttattactggtgtgaatcaaattgccagtcactcgatcaaaatcaaattcactcgtcgttacgctgccgagtttaacttgttctaaagaaaggagctgcgcattatattggaaattctgaatgataccgcgtggtgaacgagccgaattcggttgagtcgaaccattaagatatgaccaggttgattctcctgcgttgcctctggattgtttcgttaatctgccaacgccatcataggcgcggctaccaactaagatcccatctacttttatcgcggttttaagtgcttcaattgaatgagaaacaaattcggtttcgattactttcgctgaggttgcatcggcaggtatgtaactttctcgtaccaaacggtcaaaagcgtcataactgaaatgagttcggtggccatcgatatcgacttcagaaatacagcgaccaaatccatcaaaagtgcggttgaagtgatcaacaatgccgccaacgctatcaatttgttggattcgagtggctttatcgaaggcattaaaataagttcgcgtatagtgagtgccttctataccttcagtgcgcactcgttgaatcggatcgtaagcattcacgattacgctgccgtctgggcgtatagttctttctagctccccccaaccgtcgtaagaataaactgaatttaatgctaactcctgtccgctaatatgatcataggctgtttctgaaattagctgacccaatctattgtaggagcggcggcgcagtaatagttctccgttactttttatgacgctgctagacagattacggccaaaaccgtcataacgcgtaatatatcgctcaccttttgcatcatttatcaccatatttgccagcgcgccggaaatggaaaaatgatattcataatgccgacgagcttgattttgtgtattaggcgaggctatttcagtgacgagtttttcattaatatcgtattcaaaaaccagcttaactgcgtcttctttttgaacctcggtcactaggcggttgataagagatatcgtccggttagatgtcaaaaatgtagcatcatacccaacaatttttcggctttcagttaaacgatcaaggttggttgtatagctaaattgtgtgcgagtcgtatggctatttaaagttgccgcagattcctggattcttccatgcaaagcaatattggagaagttctggaggtaggttaaacgggacgtaagattcccattggtcgcacttgaagcgtgcaatacataattggcatttctacggaagttggctatttgtatataagtatgctgggtgactcttgtagattcattgcctgaagagggaaatattctttcttctcttttaaatcgggtaaataaaccgtgtggctccggtggacatagccctgcaatgccgccaaccgggaagtaatcagattcatagcgaataccagaggcttctgtccgagataactcattaccaaaatcatcagagatcattctgatagattcttcacgattacttgagctatttcgtatttcaaatcgcgtgagaatttcttttggtaattgcagattggccggttgatccgtaaacatcaccccagttatatcattgtaagtatatcgacgaatcagcctcctaccctgtttttcggtcgtttcgagcgttttaagatggaatcgattaaaggtaatttctctagattgcagcacgctattgttactgtcgagtatctgctcagtagttgagtaattgtattcgcttctgactaaatacagattgtcttgcccttgcgcaaacccgccgctgaagggaaaaccggtgaaattatgagtgctaaaagtgaactgccgtgtcatatcagcagtaccgccattcgcgcgatgagttatctgaatgacattaggaataaatgtgttattagcatacgcatgcccgttctcccgataggtgataacgtcttctccgcccataggattgcttaaattgttaatagcaatgaggccatttctaaacgtttgatagcgatatgtgtaggccggaagagtatttggattaggcggtaaaacatttctgtcgattgggatcgttgctcgagttaagtggccattcgtatgcgaaaaataagtacgagcgacccgattgttatctttcaaactgtcggaaatactgattcttccagtgttgtattctattgataatatttctctaccgctttcttcatttactatttttgacaggaaacccatgttgttatattggaatgaaatgtgctcgccattttcaaatattatttgcgctattttaaatgagtctgatggtcgcggtcggcgtaaaacatcaatcatgccgtctttataaataacatggagagtattagcatcatgtcttcttacggctatgtctttcagtttacgatctctgattctcatatatgaattgatgggaggcagtgcatcggtaaggaaactttcgccgcttaatagccttaagcgagatgtagtgctatcaaattcagtattactgattgaccaaccgagcccatagccggagtcggttgtgtccaacatagaaaagaaaatttttatatcacgactgttttctacagggccttcagggtaaatcgttgctaaacggataatactaccatattgaccagtacgctcatcgacatccgcactgaggtaagagctgaagttgaaggcattagaatatacttgcatattgatttcctttaaataatttttgcgatgtgatttatttaaatacaattaacaaagtatttttgtgacatgcttgagtgtatttaaacaagcgtgatgacattataattgaatggccgatggggctataggatataaaatgaaaaattaaattttaattacagtttagggttaattaatttcttcaataaaggaataaaaaagagaattgcgaacttcgccattttcttcctctatcaaagtcttgaattttttctgttgctgagaatttaaagaagataatttattatttgactgatggttatttttattgagatgcgacactgcctgagaacacattggcaaacacattacgctatcaataaccgcttcactgatattggggaatccgccggcaaaacgaaccagatgactaatgccaggattacgctcaacttttgaaggagtatgtatctctgggttgaaatagataaacatgtagccggggaatagcggttctataacttgcctggtctgccctggccgatcggctcgagaacgatatgtccgtaatattgggctaaaaaccatgatattcaaacgctctaaagctatttgcgcatgtagtagatttttttttccgggtttatgacaagtgagataccaacgttccattatttggccctctggcaagaggtttattaacgaaagatgcggtatgccgggccaagctccgccaaaatcgtacccaaaggatagaatttgacagttttatctatgacgaagctcaaattaatcgccactgcagactgcatctagactagatagcattcataaagtgcgaggtataactatcatgagaaatactttagtaaaagcaaattatttctacaacctagtaaacaaacttttacaaaagctatgaatgaatcggatttttctgcaataaaatagctaatttacactgcctatctcaccgtttaattctgtatatataactttagaatcatatgtatctccttgtttcggttactgctatagggtttgaagcctatgtgtgaaattatggctataatgaccatgatattatggtgctgacttagcaaacgcatctgttatattcaattttatgaaagtattctgtatggataatgttaagtctggcgataaatctcagagagtaagtaggcaataaaaatcgcgattataaaacactataaaatttatgtttttaacaaaaaatccgataggtatatttgtacaaaaattatatcgaaactaagaagaactccacttttccatttaaaataaatgatattttatgtttgaaggctatttcatctaaattattagccttataaaaaggcttgtgataaataacgatttaagttctattttgtgcgtaaaccccggcttcggcctcgcgtggtaatgatctgttcgtcgtaaaaacgcttcttcatgggcatgtcctcacgttactgaggaagacattactaacatcacggtgtattcatcgcggcgagcaggtcaaaatggtgtgcgcgtctgttgtgagcgaaaagccgatgttttacttggtaaaaatagcatggagtgtcgagattacccgttgcgactcaagagttgcggacatcgcagtgttcctaggaaaaacttcaagcagattctaaatcttatcgtttgcaacctgcggccaaattcatcaaattaagccagtacgccccttcaactcttaattatggaagatagacatgatgcataaaaccctttcctgtgcgctgctgctcgtcgcgtcaggttccgtgtttgcaacgcctcaaacagaaaagaaactgagtggaattgttaataacgttgttattcctttgatgaaggaacaggccattcctggcatggcggtggcggtgatctatcagggccaaccttactactttacttggggaatggctgatatcgcaggcaaacagcctgtcacgcagcagacgttattcgaactcggttccgtgagcaaaaccttcaccggcgtactgggtggagatgccattgcacgcggtgaaattaaactgagtgatccagtgagtcaatattggccagcgctttcagggaagcaatgggaaggaattagtttgctgaatttggcaacctataccgccggtggtttaccgcttcaagtacctgataacattaccgatgaggcgtcattacagaattactatgaaacctggcagccacagtgggaaccgggcacaaagcgtctttattcaaacgccagtattgggttgtttggcaaattggcggttaaaccttcaggtatgagctttgagcaggcgatgaataaacgcgtgttccagccattgaatctaacgcatacctggatacaggttccttcaacgtgaagaaaaacactatgcgtggggctatcgcgatgggaaagctgttcacgtttctccaggtatgttggacgctgaagcctacggcgtgaaatcttcaatagaggatatggcaagctgggtgcgcgccaacatagcgccgtctgaagtaaccgatgcctcgctacgaaaggggattttgcttgcccagtcgcggtacttgcaagtgggcgacatgtatcaggggctgggttgggaaatgctgaattggccgatgaaagcagcaatcgcggccggtgggagcgataataaagtcgcactcgcaccgctaagtgcgacagaaattaacccgcctgctcctgcattaaatgcctcatgggtacataaaactggttcaaccggcggatttggaagctacgtggctttcattcccgagaagaatcttggcatcgtgatgctggcgaataaaagttatcctaaccctgcgcgtgtcgaagccgcttaccgcatcctggaagctttacagtaaagtaaatagtatggcccgctttagcgggccttctcaaataacgggatacttctaaccctgttgcatcacgtctacttaggtggccagttttagtgtgccactccaaattgaatagacccgggtttcgtagacacttttttgcctcataatggaggctcaatgaaggagtgtttatgtcagccaaaaatttcactgaagaattcaaaattgaagccgtacaacagattagcgagcagggataccctgtttctgaggttgcggcacgactcggtgtttctaccaacagcctttacgcgtggattaagcgttaccaaaaacctgaaccacagcgaaagcaggacgatgcccttcagcacgaagtaaagcgcckcaggcaagaacttaagcgtgtgactgaagagcgagatattttaaaaaaggccgccgcgtactttgcaagaacgtcaggctgaagtacgccttcattaaacaaatgtcctccttttatgctgtacgccggttgtgtctggttcttggcctccattacagcggttattaccagtggctaaagcgacctcaatctttgcgtgccaggcaagatgagcgccaaacaggtcttattaagcagctgtggcttgaaagtggtacggtttatggttatcgaaaaatctggctcgatatgaaagacttgggtgaacgcgctgggcgtaacaggatcgcgcgcctaatgaggcttgcagagttggcttctcaaaccggataccggaaacgacgctattacggcggcggaaagccttcagttgccagccctaattaccttgagcgccagttcattgttcctaccccaaatactcattgggtgagtgacatgacctatataagaacgcatgagggttggttgtatctggccgttgttctcgatctcttctcgcgccgggttatcggctggagtatgggtggacgaatgacagcagagttggtgatggacgccttgttgatggcggtgtggcgacgcaaaccagcggcagaagtactaatccattcggatcagggttctcaatatacgagcgaaagatgtcagcactttatgacagctcacaatttaaaaagcagcatgagtcgtcgtgggaattgccatgataacgcggtggcagaaagttttttccagttgctgaaacgagaacgcataaagaaacggatctataaaaatagagaagaagcaaaggctgatatcttcgattatgtagagatgttttataatgctaaacgtcggcatagtgcctgtgaagatcaaccccctgcagtttatgaaagygcctggttcatgaggcacgctaccgtctaggaaactagggtctattcacctcaaaaacaataaagctttacgaggtgcctaacaaggtgcctaaaaggttcggatttaattagtttgcttcagactcagcgggacaaattgcaggcacaaaaaagcccgcagggcttgcgccgtgcgggctcttaggactttatcggatgactctggtaatcatcgattgaagattttgggctggcgtccctgtaactagatatctatttgattgaattttctagataactgttgtttctgactttacctttggttctataaaggaaccataaatcgtaacggcatgaacccctgaaaatagtccgttggcaaactgtatcaaaaaatatcaaacctcttggttcaacttcctgatgtcatctgaactcatttcattggtcttcctttaacatgtcgattacgttagctacatacattaagtcttccgcctgttggagattgttatgaaaaactggtcagttgagcatacgagagaagtgaagaagtggctggacatagatacatatcgcggattcgaagagcttccactcatgcagctttatcatgaactacttgcaagaaccttgttcttcaaaccttaccatgaagaatttgaagcgaaggccgtaagcctctacatcgacaggatcttcaatggaaatccctttctcatcacagaaaagcatttaggttatctcacaagagaggacacattgtatcagcccccgcacttttttctcacaaccaccgaacgactggcacaactcagcatcgttggactgcgaaattcattgttcttctgggatggaagcgatgagtattctgttaacagagaattcctcgatagccctgtatcggaagttttgccaaaattgttcagagatacggtcatggtcgaaattgacctagcaaacgggacagatgaagagatcgctgaatcactcaaagctgcacttcctcaatggcgtaaagtgcgtggtatagaaccagatgtaacggaagctattcgctttggttatggaacgattaagaaaatcatcaactacagacttataccccttattgatatcttggtatggtcaaacctgcaccaagttcgtgtatccgaagaccgcctttcccggctcctgtacacggatgatgatgatgaagaacaaacccgcctgaaccaccaaatcagggatacggacagaccccttgctctgaaggccgcgagtataccgttcatccgtcagtttcatctgttcatcaacaaaaacgaccacctaaaaaagatcagagtttcagacgtgatgaaaatcgctgattctgactaagaccaacctccattagctctggcgttctcggcttcggtctttttcctgctgattcatttatatagtaattcccatcgcaactgaaatgaggaataaaatatgaatcagcacaatactcgccttattcgtttaccagaggttctaaatcgaaccggttatggtaaagcgtggatctatcatctaatcagcaaaggctgtttcccatcaccagtcaaaattggatctcgtgcagttgctttcattgaaagtgaagtagacgaatggattcaattaactatcgaaaattcaagaaagcatgttgcctgaaataaattacagccttcttatttatgaagattaattctcaggtttgtaaagtttaaatctttaaaaaacctatatttaacgtaattctttacgtttttttaggcaggtcttacgccataggtatttaaaggtggtttcttaatatcgggtatggatacggataataatcttctttcataccagagaatagctcttttaacattaactttctttctttcttctaataatgaaagtattatatttttttctgcatttgaaatttcattcaacaatatagtgtcatcaatatcacattcaagtttaggtttgttttgttttactatgtattgacgccaatttgatggtaaatcaagtgtaagtcgagggattttactttcgttaaatactttattgtttttttctaagcatttatttttagcttctgtaagggaagtaaagatatctgatttatctgatccttctgtgtctatcactacataaacagtaataaagtcttttgggcatatacttaattcatttttgtttaaagaatcgaatgctttcttcgggacgggatagaataaataaggaacacatatcgatagtattttatatctgtgctgtgccataactcacctcgatcaacggaatgaaatctgattatagccaagttaaataaatagaacaacctttttaaaattgacaaaaaaatatattagattataaaaatataaaataataacaaatagaggtaaaaatatgttcaatgaattagattttaataaaatactaatatcttctgagcgtcgtatatatttcaatggattcgaacatgcctttttttcttacgatggtgtaaaacctatccctgaaaattttgataatatgtacttaattactaagatgaatttattaagagcacaagcaaaatcaaactttatatattatgaattatatgataataatgtaattcacactgaactatttcaaaataataaacttaataaaaatgatttatctattgatgtattcacagacaaatatataaaacgatttttacatgtaatagaaatgagtaatgatcttgacaataatgattgggaaccatatattaaatttttatcaaacatggaaataaaaaaatcattttatgcattacaatacaccatactttcaatgcctgttacttcgcatataccacaatatttggttgaaaagtacctgaataaattatctgaagaacgagatatgcataaaaacaacaacataaaatatttggaacaatatattttaaatctctttgatctaaaatatatatgcattcattgatagaatctccaatgaagtatttcataggtataccgatccttaggggaatcgatagatattcctgtatgtcgataagatgagctagacgaaaaagtactgctgcatcattcgcttatagcttatcttatgcttgcgttgataagaattgcccccatacttgtcctctcataagaagtaaggtgttcatacacacccccaacagctcatcatctctctaagttgctcaacgtattgaaagcgagtgcaggcttccctgacttcaatggtgccaacgctactgacccacgcttcttcgattaagtcagtacagaatcctttcgcattgtgattactgaagggatacatttcatactatgagccactaacaactctttgaaatccctgcgttttaacgtcatgttagcttcttagcttcttagcttcttagcttcttagcttcttagcttcttagctgtttgccgattcaagcggcatatgaaaatcagaaaacattattgattatcataggataagcagcatcttttttcggaatcgccattcagatgctaacatcctgtaacatattaattaaatggtgtatcctcatttctataggaaaaatccgctttaaagcggttgctgattgtgattattagttttgtggggcaatggcaatgtgcgaaagggtgttaaaaaaagatgtttattctgaatgggttatacgcaatagcctgtactggatgacttcgcttactcagtggaaactctgtgaagatatatcctcctggacaatctcttttgaaaacgatagtcccgaatgcctctatgagttcgagaggctgctgaatgattacactttgcgagaaaaactacagcataaaactggggcgttgagagattctattgtccataaagtgcttcgcagtgtcgatgaaaggctatcgtaatggaattgatgccattcaattttgacagattgcctaatggacaggtgtttataagcaacctcgctggttttcatcacttcattaatgagcaagagctgcttgatctttctaatgagcaaatcaatgcggagcaatcaaacgcactagaaagcaagctgttcataaccaacgaaagctcatcaggtatcgctccctatgctttaagttctgcttttgcaaaacgattgatgaatgaactggcgatcaggccaattttcatgattgtgcccacattacgttgcgaccatacctgcaagtattgtcaggtcagtagagcttcagtgaacgcctctggttatgatttagatcccgctctcatccccgatatcatttctactatcaaaaaactatcaactccaccttacaagatagagatacagggtggagagccactcttgcggttcgatttaattcagtctatctatgagcaatgtgctgaaacgctgggaagcaccgattttgagatggtggtagcttcaagcctgtctgtcttgaatgaggatatgcttgaatggtcgagagacaggaacataacgttctctgtttcgcttgatggtgaggaagttgttcacaacagtaatcgaattcttggtcatgggcttgcgtacagtagaacagtgtcaggggtagaggctatcaaacagtctttaggcgctggtcgcgttgcaacggttactacagttactaaagatctcattaggcatcctgaatcgattgtccaggctcacttgtctcttggcctcaaggacatgtttatccgacctgtaagtccctatgggtttgcacaaaaagcatcgttcacattttctatgaaggaatacttcagtttctatgcctcgttgatagatgaaattcttaagatcaacaaagaagggataagggttgttgaacattcggcctccattcatctgaaaaggatcttcaatcccggttttagtggttatgcggatttaaagtcgccaagcggggtcgtgcttaacagtattcttttcaattatgacggtcgagtatatggtagcgatgagagtcgtatgttgcagaaggtgaaccctgaaacggagttcagtgcgggtgaggttaaaacgctatcattttctaagagtccttactataacgcagtgttgagttcatcgttcaattttgctctgccgggctgtgatacatgtgcatatcaaccattttgcggtgcagatccatgccagaacataagtgtacagggtgagcctgtcggtgataggagtcgttcaacgttttgtcagtatcacaaggggatgttcaggtatctgatgaactgcatctcagaaggtggtcagaaggctgagatgctaaaaggatgggcatatgtctgaggttattaggaacgatatctttcattttgcttcaaaaaagaatgtgcccacggggttctatcggttatgcaaacaaaaaccaatgaaccctttattctttttacccaatttactggtagttgctgaaggcaataatgatgccattcaaccatgctttgatttctctgttattagcactgaattatatgagtcaattgaagatggagatattgggataatcaacaatggcaatatgatacgcgtaattctgtcccgcagagccaatcataatactgtcttagtaacggaacgctgcaataacttgtgtctgttttgttcgcagccacctaagaaatcaaatgatgactggctacttacccaatcagctcttgctatagcttcatttggtttggatggagttgttggggtcagcggtggagaacctttgctgtatggagatgatttccttcacttcattgattttatcatcgagaattcaccagatactgctttgcatgttttaacaaacggacgcaaattttctgatatcaactttactcaggaaatggcaaagcgaagcaaaaagatcaaaatcacctttggtatcccgctctactcatcaagaccacttgtgcatgatcatctggtagggaatgatggcgcatttaatgaaacggttaaggggttaattaatgcaggaaactcagggattaatatcgaacttagagttattccgacactggctaactatacagaattggatgatattgtagagttcgttggccgtgtgttctccaacatcaatcagatttcccttatggggctggaatctatcggttgggcacgaaagaactggtcaacaatcttcattgagcacagcagttatagtgagaaaataatctccgccatagacgctgcgcacaggtcaggtatacctctaacaatttttaattatcctttgtgtcatcttcccgaaagagcttgggagcttgctgctcagtcgatctctgattggaaaaattactatcctaaagaatgtgatgaatgcactcagaagtcttcctgtactggttatttcagttcctcaacaggccgttttcatcaaccaccgagaccaattttatgaaaaaatttaattttgctgctctacttccgggatttttggcgctcaataattctgtatgggcaagtgattcatccaccggagcaagtgatttgcctggtatgactcttaatgaacatgatttagtgatagccccacttaacaccgaagttccattctacattgcagggcatcgcagtcatagctcccatcgaagccatagttctcaccgatcatcatcaggtggcgggtactatggtggcagcactccttattatccaaaaacatacagctcaccaagctcatctgggtcttcaagttcaggaacaagttcctcatcgtcctcttcctctgtgcgttcgcttcgttctaacgacaataacaactctactactacgaattctgttggaactacagaagctaaccgtgcaagtaatgggctgacttctggtacagagaagcgtaagcgcttaatcatgcgggttcaattcgctttgctggacaaaggttattacaacgggaatattgacggcataatggggccttcgacaaggcagtcaataaaaaattatcgcattgcgaacggactaccagtaccctcaagtgaaaccttggatacacagttgttaaattcattgagtattttagctcgataaattaagtatatttaaaattgttcactttaacattaacttgtatgaatatatatttcagaggcgattaaatgtcagtcagttataacatatatagaatgccatataagagtcttccagaattgacaaaaaaaatcattaaagaagggcttgtcgaacaaaaaactattctacatcaatcttatcaactcaaattttatttttctgataagttaaaaggaaatgaagtatggtggtgggatgtatttagtgatttctttaatgaagaaattgaaaagcctcataatatattctattttggcctgctaataggatttaaagaaaaggaccctgagaattgctatcttatcagtcttggtaaatcacatttttatctcagcaagtttattgaagcagactttgggctgaatgtggcaatgcgtatagctaatgatgaaaatattttgctcaagaaaagtagattcttttgtgggggaaagagtcaggaggcatcgtcatattcaaagtttgtgcaaggatcatattttcctggcgaatccatcgaacatcttaaaacaaaagccaaagaaactgacaagtggggatgtaataatataactttttctgattcaatacagctaagtttagatggtgcccctactgcattagtagatgtcttcaatgatattgattcttcgttggcaaccaaagagaaaatcgaatttcctaaatcggaaaaaatcactgacgagtcaaagatagatgagcttgataattatctacttcaatcgatcattaaagatgatgtaaatgttattatagatgagattcaatcttttggtgcctctattgtaattaataattctttgacattttttaaattgcacacaaaagttgaggggagtggaaagtatcttcaatcagcagataaggttaacgatataaaaataacagatgttaagcaatttataaaaaacaacgacataaaggatatcaataaagtttttgttaagataactaatgaaaataacagtggtcatacggcctcgctaaaagaaatattgagtattacttatagcgatggcagtgagcactacttccttaagaagggagggtggagtcgatttaactctgcctttatgaagtatttgtctacctctttagccagtataaaatttgaggttaaagatgctctaaaggaagacgaattcaaagcatggcaagctgaaaaaataaaacaaatcgaagaaggaacttctaaagacaaattagaatatagagagtactattttaatgaaaagatgtctgttgagaaaggttatatacttctagatcgccagctcaaaaaaataccatccttacgtgatgatggaaaggactacaatgttgaagttgcagatctttataaaaatggagagattattgctgtaaagatatcagataaaccgcatgatctaatttataatattgagcagtcaaaaactacaattcaaactatagtaagaggagtagtaaaatttgaagagaaaattactgatgtggttttatggatctcaactactacaaaagccaaaaaattgattgacatcaattctattcaatttttattagcggttcaaacttggaaggaagttgttgaaggatttaatttgaaaccaaagatatattattcgcatcacgaaaaacccaaaaagaaaaaggaaaagaaaaagccaaaaaacggttgattaaaaatattgaatttccttatcgaataatttcaggagagaaaagaacattctaattatcacattataaatattatttgagtgtattgatggatttaaaatcttatgtggtggtgttatgtgaaacttacaccaccattgtttattgaacatttttaagaactttcaaaatttactctggatgttggttataaaccccttagctgataagctgtggcactatttatgcaatcatagtgccctcataatctctgtacaattttatttgaaatgaattaaaccataattgcctcttaattcattatcaacaagagtaaagttcgtcatttctctgtcaagccaataagactcttcaatatgctctaacagtattatttggaaaccaccatgagaccgcattttctcaacaaaagaattaatttcatttagggctgcatcaagacttgcaaagtcatcagtttttttaccagcagtactaaaatatggagtgctgggctggtcaatgactaagaatcgtggaacccacggtacttttctatctcttaccaattcgtgaagtgcaaggaaataagctacatgtacatacatatagttagaagcacttccaatatctatcattttttcaacttgatttttatttatcaaatcaagtgttttttttgccttgttgaatatcggagttgcatcctcaaatccttttaaaggcatccgtttgaatatttcctttattttttcgttcagtaaactcaatgtatattctttaaaggcattattatctgttatcttgctttctaactcattaattttagtagttatcttttctatagtatcagtataatcatatttagggagaacaactatccgtttaatttcagagctgagttcacccatgaaccgataaagctcgattggtgtgattttttcatcactaacagttgcaagttttttactcaaggatgatattttaagttctaactcttttctcttagcatttgtttttgatatgagtgagttttgtcctttttcggctatagccttttttatctctgagctttggttcaataaggatttaatgattgaatagatgttttttgtatataatatttcgctataattatcatctaaatatttagctattaaaagagagtcttggttgtcttttaaaaacttcttatattcagtatttgtttctatatattcattaatgtctgtcagttctttttttaagaggaaaagttctttttcaatttttgttctttcattaattgctgggatttcgtttatattcttgtaattaactatcgctttcaaattttcaagtttatcacttacagttggttcattcttgctgtttccacttattaaaccaaaataatacgccctgtcgtatagtgattctatttcactttcgaaattgaaataagagtctttgctagccgactgtttatattcgatgcgagcaagattcctttgtaattcttctaaccgcgttctcattatcatagtttcggcgttttcactgccaagagccatgtcaaaggttcggtcaatacgctctcttgtctttaaatcagagattttcgaataaagatgttctgaagaggttagtgttgtttgatctataaagcaatgcgggataaaatatctataggatacttttgacccttgttgtatgaatctaccaccataagggatttttagagaactattaataccaaactcataattcagatgttcttttaaaacatcctttttgatattgttaatagggatttgtggaatgtctccatttttgtcaaagtaaactagatcatcttcttcaaagtgtgtcgcttttctacaaatagtgaaatatttaccgtttatacttaatctaatcccataccaatttacaaaattatcgacatttgtttttgatataccatcagatgatgaggataaaaggcaataatcaatgatagccagtatggaggatttccctttgccagaatcacctgttattacatttaccttattttcctcaagttctaaattcctcaaggttgaatcaatttgccatattaaaatattagtaatctgcattataatctaactccacaaatgtcatatatattgtgtggttcttctaataataaacgtgcaacatttatagatgctgcctgtatttttacggctcttttgccaataaacgggatcgcattatctaatattaacttgtttttaaatgctaatttgccgtgttctaattcagctattccattttcaaggcacaatgaaacacaattaactgaggatggaaggaaattatagaatcttttatttatggatactattatttcgggcttggttaatagtagatcttgaaaagatagtgtattggttctcttgtgggcaaggtaatctaagctttttttatgaaatataattggtaaaattagcattgcattgcttatttcaatatttgatgctattgataacacctcttgcaaagagaatatacccaaaagctcattgttatatattttcatttatagactgactcccagttttgaagccatcctattttgggcttatctgaaaggagcaagaacgttcctgtagtcatagatttaggtaattgatttttatccaacacaatattacagtttcctgtcaattcagtatagacagagaaggctttattaagatgatcttcatttatttctgtaaaacggcttcgtatatacgttgctgaatgacgtgattgccattcatcaagcgcttttagatatattagtctttcttcttgagttgttaaatctccagagctttgcaatttttgaatgaaagcttctgttttggccatttcatttatatattttacgattgaatcgctattcaaatccaaatctttgagttgtttgtaagatatctttgattcaacgttagttgggtatgcagattcaaaatcgtagtattggtcgaaattatttatacaatttcttgaaatttgaataatcctatctattcccaaattatttcgaaaatcatcataacttatatttattttggtgtgatttttaaccaaatcatatttgtgtttaaaaaaagcacctgaaatataattaaaagcatcatctattttatcatcagggattgctaatgtttttagtaatgtttttatttggcggatgatcccatcttcgctatgttgaaaacttatactattaaataaacgtttagaagaattgctatcgagtgagtttatgatagaaatatacttatagaggtcatctgacttatttttatgatcttgttctatcttttctatttcatcttttattttttcaatgtccttagtgtcgttagtcaaaagttgcacgataccaggctctaaggtaagacctttgttagtgtaaaaaataaggctaatgcttttgtcgcctatggtcttaatcgcctctgaccaattatataatgtttttcataagtctatgtctttattagttatattagacttgttaattgaatgtttaacttgaaccaaagttttatgaccctcgatgctctcaagatggagatcgtcataaacttcaatcccaatgtgttcttctggtttaagctctaaggcatgttttaaagcaacgtaatcttgataggtaaaacctattgaatttttgtcagcattagttttttcaaagaaatccatatggtagcccactaaggaaacaagcaatgaaagcataaaaaaacatcagtatctttttttcaccatatcaaacactaaaaacatatggaagcatacgtatcaaagtttagttatataaccttatgtttttatactggttttatgtacatgtgcgctttcaatccgatgagaatgttttagctaaggggcattcgtcagcatatgggctttccaggctatccctatccttcttgctaatcccctgtatcagtcaagcagcgatagctttagctctttgagtttgaacgtaatcactccaccattgcatcaaactctgtcgctctatcagatattctgcacgattgtatgctgcgataatttcatcttttttttgagtgggcaagcgctgcctcaagaacttcagatctgaacttaccggattcttctgccgctgttcttgcaatagaacgcataccgtgagctacaagctcacctccaaatcccattcggatgatagctgcattggcggtttgttcatgcatatgattaagcggcgctttaatgctggggaaaacccattctctatgcccacttattggtttcattaattcaagaatgcgcaaagcttctttactcaaaggaactttgtgaggttttttcattttcatgaaatcagcaggaatgttccaaatactgttggttgtatcaatatcagaccaccttgcgcgaacggcttcacccggacgaacccatgtcaacaattgccattcaattagcatacgtgtttccaaccggattgacgcattcgtcaaagattccataaaccttggcaattcgcttgggggaagggcaggcatattttgctttttgggtttactgaatctttggccaaggttgtcagccgggttgaactcaataagttcttcagtggctgcccaacggaagatttcattcagacgggaaatgatgcggcgtagagtttccaatacgcctcgatgctcaataggatcaaggtgttgttttaagagcttaggtcggatctcattgatagggatattacccagaccaggaaagacatttctctctaagctgcgccagatgtctgctgcatggtcttgtgagatacctgaggtctttaccttctcatctaaccatttccgcgctacggcttggagagtgtgctcagtagcactctttaatgccttcgccttattgttgttatggacttggggatcaacaccatttgccagaaaggagagatattcgtctcgtaaggctctggcccttgcaagggtaaggtgaggatatgtcccaaggctcattttggttcttttcttgctcactggtactgcatacctgaaataccaatttttcttgcctccttttgccaaaggagcgattcgtagaatcaaaccatcgccgtcaaataagttgatttctttatcggctggcttagtgcttttgatttcagtgtcagtgagcttcttagcgatttttgccatttgggaccctcgatttttggacccttcttagtgggtcccattcagggtgccataactcgtagttctcagcaattctcactggacgacaatagacgtaaaaaagcccgcagagcttgtgctgtgcgggcttagtagacttcattgtacttcaaacaactaaaaagtggtggagctggggggatttgaacccccgtccgaaattactacgccgtcggcactacatgcttagtccagtcattacattcgccggttagctgcggacggacacgccactaacaaactatcctgattgggtttaacgctttcaccccaggcaaggtgtccacgcgatctcttttgggtttgacctctcttgatccccgtcctaagagcggaggctagggagagagggaatcttcagtttcttaggctgattaagctgctaaagcagcagattcgtattgcgagtcgtttgcaattattttttttgcggttttttacgaggcctccgcacctcggcatgcaccttgggtttcgcgaatcccgtcgaatccagaatcagccccaaagaacttctgtagtataccagaactataacctgttaagccagagacttaacgattagagtgtttcataattctggctttatcaacctgccattcgcgatctttaatatcatcacgcttgtcatggtctttcttgccttttgcgacgccgattttaactttaacccaggcatttttccaatagacggaaagagccactacggtaaaaccgtcgcgattaactttgccgaccagtgagtcaagctcacgtttattcagcagtagtttacgggtacgcataggttcgcaaacaacgtgtgtagacgcgacgtttagtggggtaatggtggccccaaacaggaaggcctcaccgtttctaaacgtgacgtagctatcgctgatgttggctttaccagcgcgcagagattttacttcccaaccttgcagcgataggccagcttcgaattcttgttcgatgaagtattcgtggcgggcgcgcttattttgcgcaatggttgcggaaccgggtttgtatgcttttttctttgtcatagtgttgatcattatactgtatgcgttgacgaatgaaatcctttcccgtgcgctgcggccttattttgtcgattttattaccgtttatgcgccgttgattttttgtcagttgccagataaatggtattatccgtgcgttttatgtctctcaggaaatgttatgccacagattagtcgctctgcattagtgccattcagtgcagaacaaatgtaccaactggttaatgatgtttgctcttacccagagttcttgcctggctgcacggggagccgggtgcttgacgcttgcgataatgaaatgacggcggcggtagatgttgccaaagcgggtatcagcaagacgtttaccacgcgtaatacgctaacggataaccaaagtatcaacatgcagttggttgacggacctttccgtaagctgatgggcggttggcatttcacgccattaagccctgatgcctgtaaagtggagctgcatctggattttgaatttactaacaagctgattgaattggcttttggcaaagtgtttaaagagctagcggggaatatggtgcaagcattcacccagcgtgcaaaagaggtctacagtgcctgatctttacgttgaggtcgtttatgccttgccagagcgtcagtatgttcggaaggtgagcctcgcggaaggcagcacggttgagcaagcgattgaggcctcggggcttttagcgttgcgtactgatattgatctgcaaaaaaacaaagtggggatttacagtcgccccgtaaaattgggtgacagagttaatgatggcgatagagtcgaaatttatcgtccgttaattgctgatcccaaagagttacgtcgaatccgcgctgaaaaagcaaaaaaataaggcgcgttgtgcgcctcactttttatcagccctgaagcatgacggataaagccagtctgattgaagatcagcgccaatggcatttatccgttagcgctatatcgaaggtgattctctatcttccttctctaccactagcatgatcgacgaaaaaattaatttccgctcagcgctggttcatttttaatatcagtcagaacaccgctgctgttgaacgtcagggtcagcgtctgctgtgtagccttttcgtgtcccggctgctggcggaatacgtagaaccaggtttgagttccaaacgggtcctgcagcatcggagtacctagtgtgtatgccacctgttgctgcgtcatacctttatgaattttggatacatcgttaggtgacaggtagttaccctgattaatatcaggccgatagaccaccttttccagcgtggaacaacccgcggtaagcatcattagcattacagcggcggcagtcagcattttacagcgcatagtaatcacattcctttagggcataggatgacgatgataatagaccttgcagcagttggaaacctttacaaggcttcaatatgacctcctgaatgcaaaaaagttgagcttttttatgcagcaagcagctctttcgcgtttgccagggtatttttcgtcacttcgctaccgcctaacaggcgcgctaattcttgcaaacgggcttttttatccagcttatgcatctgtgtttcggtttctgcgccatccgtttgtttactgacaaagaagtgttgatggccacaacctgcaacctgcggaagatgggtcacacacatgacctgagtggattcccccaactgacgcaacagttgaccgacaatcgccgccgttggcccgctgataccgacatctacttcatcgaaaatgagtgctggcgtatccattttgcgagcagtaataacctgaatagctaatgcgatacgcgataactcgccaccggaggcaactttagccaaaggttgcaaaggttgccctggatttgtggtcacactaaattctatacggcttgccccttctgcgctgaggtgttccggctcgaaatgcacaccaatggcaaatcggccatgcggcatagagagctggtgcatgctttcggtaatcaaggtggccagctcttctgcataatgctgacgagcctgatgtagctgatttgccaatgccaatgcgcgctgatagtgaagattgaccgtttcgcttaactgttcctgatcgctttcctgttgcgaaaggagttgttgttcatccagtagctgttgatgaagctgaggaagttcttccggcgcaatgtggtgcttccgagccagattaagctggcgtgatagtcgctgttccagttcatataggcgattcggatccatatccaacttttcaccataatggcgcaattcatcgctagcttcgctaatctggatcgatgcttcttccagcatattcaataaattgttgaactgctcatccatgcctgccagttcggtaatatgctgtttggcggtataaagctggctgagaatattttgttgttcatcatcagaaagcaactgtagagcctgctggctgatagaaatcaactgaccgctgttagccagacgcttgtattcggcatcgatctgctcatattcgccctgcaccggtgcgaaggcattcagctctttaagatgatattgcagcagttgatgacgagcatcacgctcaagggattgcttctgatgcaaggccagcgaacggcagctctgatgccacagttggtaggcggttttcatttcagctagcaatgccggttgatcggcataggcatccagtagctgtttctggtgatctgatttcaataacagctggtgagcatgttggccatgaatttgaatcaggagttgccccagctctcttagttgagaaagaggaaccgcagtgccgttgataaagccccgcgaacggccatcgaccccaatagcgcgacgcagcagacattcattgctgtcatccaactggtgatgttcaagccatgcgcgagcagttggggtgtctgctaatgagaaacgagcgcagatgtcggctctggaagcgcctagacgcaccatgctgccatctgcacggctacccaagcataatcctaatgcatcaatagcaatagatttgcctgcgccggtttcgccagtaattgcggttaatccgggctgaaaatcaatttctaactcgcgcacaatagcaaaattactgatggtcagttgggccagcatggtaaatctcctgtacataaacacatgtctgtatttgaatacagtataaactggttttatatacagtaaagtggcaaaataactttttagaataatttttttgaccaacccaacttggtgcttaaggtattgaaatagctgtagtcctttggatgaatcaaattcaggtggaaatcgctgcgtcgaaccaggacttcttcaccttcctgaatgggtagggcgatctggctgtcacagctcacttccagatcgctgctaatcttggagaatttcaatcgaatggtgctgctgctgttgataaccaagggtcgcgcggaaagcgtgtgtggaaacatgggcactaaaactatggcgtccagcgtcggcgtcaatatcgggccgccggcggagagtgagtaagccgtagaacccgtcggagtggcaataatcaggccgtcggatcgttgggaaaacgcaaaacgatcgtcgatatacacttcgaattcgatcatatgcgcgacttttccggggtgtagtaccacctcgttgatcgcggtgctcattctgcattgttgattggctcgccgaacctgagtttccagcaaaaatcgctgttcgctgagatattcgccttccagaacgtcagaaagttgctgttgcgcgttatccgggtctagatcagttaaaaatcccagatttcctctgttgacgccaatcactttgatatcatatcgagctaagacgcgcgctgcgcccaacatgttgccatcgccgccgaccaccaccgccagatcggctttttgaccaatttcagccagactgccggtaacggcgttggttaaattgaggtcgcgggcaatttgccgttcaaccataacggcataacccttggattttagccaatggtagagcatttcgtgtgtagcaagagcggccgggtgacgtgggtgaccgacaataccaatacagttgaatcttttattcattgccgtggttttcctcagtagagcctgtttgtgccctacattgtgaccggttcccttgaatccccggttttgatccccataataagccaagtagcgagattaatgctaaaacgcggagatatccatgagtagtaaagaacagaaaacgcctaacgagcaagtctcggaagaaatggaacaagcagtcgagcagcaagcgggagccgcacaagagactagtgacggtgttgatccgcgggttgcagagctggaaacccaattggctgacgccttgcagcgtgagcgcgaaagcctgttacgcgcgaaagctgaagttgagaatatccgtcgccgtaccgaattggatattgaaaaagcgcataaatttgcgttagagaaattttcatcatccttactcccggtgattgataatctggaacgtgctctggaatcagcagatcgctccaataccgaattgacatcaatgatcgaaggtatcgaattgacgctgaaatccttactggatgcagtgggcaaatacggtatcgaagttgtgggtgaaaccaatgtgcctttcaacccggaagttcatcaggcgatgactatgcttgagtctgccgatcatgagccgaaccaagtgatgatggtgatgcaaaagggttatacgctgaatggccgtctgttgcgcccggcgatggttgcggtttccaaagcgaaagcttaaggctacccaatcaagcaaaaggcaccttaacggtgccttttttacgagttcaatcaggtagttggaaatttaggttgccagtcgataggcgctaaattctgttttatcaatagttgattggcctgtgagaagtgtttacagccaaaaaagccgcgatgggcggagagtggggaaggatgcggggctttcaaaatatgatggcgctgcgggtcgataatttgcccttttttctgcgcgtgagccccccaaagtaaaaatacaattccttcccgatgctggtttaatgcggcaatcacccgatctgtaaaagtttcccagccaaaattggcgtgtgaatgcgctttgccaccttcgacggtgagaacggtgtttagcagcaatacgccctgttccgcccagctttgtaaaaaaccgtgattggggcgttcaaagccgggaatatcggtagccagctctttatacatatttaccagcgacggtggcgccggtacgccgggcagcaccgagaaggacaaaccatgggcctgatttgggccgtggtacggatcctggccgagaatcacgacttttacctgatccagttcggttaaccgaaaggcattaaatacgtctttttgcggtggatagacgattttccccgcgtgacgttcggcggcgacctgagccagcgtattttggaagtagggttgttgcttttcctgaccaattacgtcgtgccaagtgagggaggtggtcatgagactctcctttgtttttgctgaaaatttatgttgctcagcttaccggttagcgttgagcagggaaactgttaaaagtttacggtgtagatgtcgcttaaaatagcgccaattaatgtaatttttgttgaaaatttacaaaaataattgttgcgttggtatttgataaaattgatataaaacataaatttgcccacagctcgtaaagtgctgggctgtaaatcttgatttaagtcaaagaataacggtgatttgactggtatataaaacaataagagaacaatggttttaccaaataaccaacgtcacttttccattcctggaattttagccgtattacggaggcaccaaatgattactggtattcaaattactaaagctaacaatgaagccttgctgaactctttttggctgttagacgacgagaaaaacgaactgcgctgcgtatgcgctaaagctgactatgcagaagatcaaatcgttcctgctagcgaattaggtcagattgaataccgcgaagttccgctggaagttcagcctaccgttcgtgtagaaggcggtcagcacctgaatgttaacgttctgcgccgtgaaactctggaagatgctgttaaacatccagaaaaatacccgcagctgaccattcgtgtttctggctatgcggtacgtttcaacgcactgactccagagcagcaacgcgatgttattactcgtactttcactgaaagcctgtaatttatagggttttagccgtgagagtttaatgaaaagggagctttggctcccttttttattgtgcgccgtcttttctaaggtaaagcctgagcggcttcacacttttcggtattcaataagtcattcttatcttttctcataaagaactcatccgacctgccgatagccaagttacacccgttaggtgttcgcttaattttgctgtcgacaaggagtcgtaatgactatgccactgagtctttccgtagcttcgccgttaaatactctgtctaatccaattattccatcgaattcggtcagaacggcgagcacttcaactgaaactgagtcaactttttctgccgttgtgacagccaaaaatgcggtgttttctgctgcaacacgggaaagtaacgatctctatcaatcaatggtttccgatcttggtttatcccggagcgagcagtctgcggcgctaaaatcagctgaagtgataggaaagggtaaagcatctcagaaaagcgattactcgctggcgctgttggctaaagatgtttataggccaaccggggctaatctggacggattccagcgtttaagtgatgctgatctgcttaaagcgggtatcgatcctgctagtttgtctgaccgcgcctctggttttcaggctggaatctattcgaatcagcagcagtatgttctggcttttgccggcaccaatgatatgcgagattggctgagcaacgttcgacaggccactggctatgacgatgttcaatataatcaggctgttgccttaggtaaaaccgcgaaaatggcctttggcgaagccttggtgattaccggtcactcgctgggcggtggattggcggcaacggcggcattagcgacggcgaccgttgcggtaacctttaacgcggctggcgtatcggatcacacgctaaatcgtttagggatcaatccggctcaggcaaaaagtgaagctgaaagtggagctattcgccgttatagcgaacaatatgacatgctcactgacacgcaggaatcgacgtctataattccgaatgccattggccataaaatcacgctggcgaataacgacaagctaagtggtctggacgattggttgccgcataaacatctttcacgcagtctggctgctcatagaattgataaagttctgtcttccatgagcgagcaaaaaccctgggagttgaaaaatgcctgatagaacaccgatgaacagttgcctgcggtatattcgctacactgtttgcggtgtattgatatcgcttatgagttttgagggattggcgatgactgagagtaaaaatgtatttaacgatccacaagtaacgccgattgccgaagctatttatcgtggtgatgtcgcgcagatacagcagctcgcttctgaaaaaatcttgcagcagcggggggatcaatcgatcactttgctgcaatgggcgatcttgaatcagcagccggaaagcctggctgcgttactggaacttcatgccgatccgttccagcccggcttgcaaggcaacagtgccttacatactgcggcgagcgttaaggatgctcattatttacaaatattgttagatggtcggttgaaaccgaatgcgcgcaatagtattacgtcggcaactccgttggctgcggcggtgatggctgggcgagaagtgcaggtgatgatgttattggctgcgggtgccgatcctaacctgccggatcgcctgggagacacaccgctgcatttggctggtaaaatcaatgcgccagaattggcgctacgtttgttacaggccggcgcgaatgctgagttgcgtaataagcagggggctcattttcagcagtattttgcaatgacgccgcaaaaactacaaaccaatgaaatgcagaggaaataccagcagttgaatgaatggctacgggcaaataaacaggctgaattataccagaaacagccttgagactgcgccgcagcgatagagcaacggccgtgtgttaagtgcctgttttgtagataaacagtgtggatttaatttgctcgattttggacggaaattggggatcttgatgaaattatccttcagcaagacaaaatccgtggatgagtttacccataaaaaaagccgctttaacaagcggctttttgctgtccagtggaataaacctgcgcgttaagcgtcagctttattctttggtttacggcgcttaccgacatttttagcatcgcggtggcgcactttaaccttggttttttctttgttggccgccttcagctctttacgcttcgctaaaacctttttcgacggtttgccggtagatttggcgcttggctctttactggttggacgcaactcgtcaatgacccgaggtttcagtggttctttcagataacgaccaattctgcccagcaataaatgatcatgtgcttcaaccaaagaaatcgccacgcctttgcgaccagcccgaccggtacggccaatgcggtgcagatagacgtccgctgtgagcggtaggtcaaagttaaatacatgactgatatcgtcgatatccaggccacgagacgccacgtccgttgctaccaatacgttgacgcgaccatcgcttaaacgaataaccgcttcggtacgcttggcctgaaccatttcaccttcgaggaaccaggcgttaataccggcttcacgtagccagctcaccaattggtgcaccttttcacgggtacgcacgaagataatggatttctgcacgtccggctgtttcagtaaatgaaccaacagggcagttttgtgttcgatattgtctgcgcgatagtaccattgctggatttttttacgctcgcggcgagacggatcggcttccaactctactggctcttcgagaatacgctcggcaaactcgcgaatcgcttcgccttccagcgtggctgagaacagtaatgtctgcttacgccagcgagtttccgcggcgatagtttcgatatcctgcgcaaagcccatgtccagcatacgatcggcttcatccagaatcagggtttctaccgcacggcagtcaaagttctcttctttgatgtactgcagtaaacggccagtggtcgcaaccacgatgtcctggttctcgctgaagacttcagcatggttcatgtaggccacgccaccggtgatggtcgcgatgtctaactgagtgtgtttggccagttctcgggcctgatcggcaacttgcatcgccagctcacgggttggcgtcagaatcaggatgcgcggtggcccggattttttgcgtggaaaatccagcagatgctgcaaggctggcagcaaaaaggcggcagttttgcccgtacctgtgggagccgaacccaatacgtcgcgtccgtccatagctggcggaatagccgcagcctgaatggcggtagggcgctcatagcctttgtcgcgcagggcgtcaatgaggcgttcgtcgagatcgagttcggaaaaattggttacagtcatggtcttcctctacttggggcgccgattatagacgggttagccgaattcttcacctgtttaagcgggaatgatgtcttttaccttcaatcatattgtcctatgctacgccagttaaagattctggtgattaatgtgagcgaacaattgaaaataaaaccgagtttacgtcgcggtggttttacctttaaacagttttttgtggctcacgatcgctgcgccatgaaggtaggcactgacggagtattactcggcgcatgggtaccgttacaacaggctcggcgcgtgctggatatcggctgtggtagtgggttgattgctttgatgatcgctcagagatcgtcttcggaagttttgatcgacggcgtcgaactggaaagcgaggcggcggagcaggctactgaaaacgcgcaggcttctccttggcacgatcgaattcgtatttatagtgccgatgtaaatgcattcgcagaacaccatcctcatcaatatgatctaatcgtcagtaatccgccttacttttctccggcggtggcctgccgtgatgaagcgagaaatactgcgcgttataccggatccctgactcacgaagcgttgttgcgtagcgctgaacgattgatcacgccggaaggtcgcttctgcgtagtattaccgcacagcattggtgaggatttggcagcgtcggccgttcagcaaggttggtttgtgcggcaacaggttgatgtgcgagacagacccggtaagccattgcaccgaatgttgctggttttatctcgtcaggatggagaaaagctacatcagcatttaactttgcgtcaggcggaggatgtgtattcacctgaattttgtcagttaattggtgatttttatcttaactattagttgtgaaatattcattgtgacaaatagataaagaaactaagggcactgaagtgcccttaacagaataccgaaatatcagggttgaaggatggtcgggcgcggattttccagtagatctggataatcgagcgtataatgcaggccgcgactttctttcctttccatcgcacagcgcacgataagttcggcgacttgcaccagattacgcaattccaacaggttgttggaaatacggaaattcgcgtaatattcgtcgatttcctgctgcaaagtattgatgcggcgcagggcgcgttccaaccttttggtcgtacgtacgatgccgacgtaatcccacataaatagccttaattcatgccaattatgttgtattactacgcgttcatcggagttatcaactcggctttcatcccactcaggcagatgtttggctaatttggcgtggggtaaacgcatcaaaatatcctcagatgccgaccagccgtaaaccagacattccaacaatgagttagacgccatgcggttcgctccatgcagcccggtgtaactcacttccccaatggcgtacagcccgtccaaatcggttcgaccatgctgatcgaccatcacgccgccgcaggtataatgcgctgccggaacgatgggaatagcttccttggtcaggtcgatgcccaaagacagcagtttttggtagatcatggggaaatgctgcatcacgaattcagttggtttatggctgatatccagatacatacaatcggcacccagccgcttcatttcatggtcaatggctcgggcgacgatatctcgcggtgccagttcgcctcgcgcgtcaaaatcaggcataaagcgggtgccgtcagggcgttttaggtaggctccttcaccgcgcagcgcttcggttaacaggaagttgcgcgcctgtgggtggaacaggcaggtcgggtgaaactggttaaattccagattggcgacgcggcaaccggcacgccaggccatagcgataccatcaccggaggaaatatctggattggtcgtatattgataaaccttagctgcgccgccggtagccaacaccacggctttagcgcgataagtttccactttttccagctcgcggttccagacataagcacccacgacccgcttggttcccggcaggccaattttattcgatgtgatcaagtccacggcattgcggcgctctttcactgaaatattggggtgggtgcttgctttacctaccagggtagtctctacttctttacctgtagcatcggctgtatgcagaatgcgtcggtggctgtgaccgccttcacgggttagatgaaaacgttcttcgccgctggcgttggtttcggtatcaaagagtacgccctgatcgataagccattgcacgcagctgcgtgcgttactggcaataaattcgacggcatctttatcgcacagcccggccccggcaatcagcgtgtcatcaacatgtgagctgatactgtcggtttcgtcaaaaacggctgcaattccgccttgagcataaaaggttgcgccttcgttcagcgggcctttgctcagaacggtaactttacagtgtggtgcaaggcgcagcgccagtgacaggcccgcagcgccgcttccgatgatcaatacatcgctaacatgttctgatgatgatgacataacgtatgatgtgtgcagaagaagggtgattttcatggtagcctatctgcccgagcaaaagctacgggtatcagatattgaaaggatatcgaaagaaaaacagggcaatagggaactttgctttttaattaaactccaagcaagtgcttgctcaggaaggtaatgatatgactggcagtacgatttttagcgtggggatatatttcgggagagtttgcctcggatgagcgagcagttaacggatcaaatgctggttgagcgggtccaaaaaggagaccaacaatcgttcaatttactggttattcgttaccagcataaagtggcgagccttgtatctcgatacgtacctcagggcgatgtccctgatgtggtacaagaatcctttataaaggcttatcgcgcattggagtcattccgtggcgatagtgctttctacacatggttgtaccgtatcgccgtcaacacggcaaaaaattacttagtcgctcagggacgtcgtccaccatccagtgatgtggatgcaaatgatgctgaaaattacgaaaatgcgggcgcattaaaagaaatttcgaaccctgagaacttaatgttgtctgaggaattgaggcagatagtttttcgtaccatagagtcactcccggaggatctccggatggcgatcactttgcgtgagttggatggtttgagctatgaagaaatagccgccattatggattgcccggtcggtaccgttcgttcgcgtatcttccgtgctcgcgaagctatcgataacaaagttcagccgctgattcagcgatagcggacacataaagggtatttaggcatgcagaaagaaaagctttccgctctgatggatggtgaaactcttgatagcgaactgatgagttctttatcaaaagataacgaactgcaacaaagctggcagagttatcacttaatccgtgacactctgcgcggtgacgttggtgaagtcattcatcttgatattgctagccgcgtggctgctgcactgaaagatgaacccgtccgcttcgcaccagctgccgtgcctgaatctcaacctcagccgcatctctggcagaaaatgccgttctggaacaaagtgcgtccctgggctagtcaacttacccaagttggcatggctgcctgcgtttctctggcggtgattgtgggggttcagcaatacaaccagccagcaacagacactatgcagtctgaatctccggcctttaataccttgccaatgatgggcaaagcatcgccagtcagttttggtgtgccggttgatggaacttttggcaacagtcagcaaaagcaggttcaggaacagcgtcgccgtgtcgatatgctgagccaggattttgaattgcagcgccgtttaccgcaggatccgctacaacaagaacagtctgtatcgccgcaagccgctattcaggtgcctggaactcagtccttaggaatgcaacagcagtaatgaagcaacttttgttatccgtctgtttactgacgggcggcctgttcgtgccaataatcgcctctgctcaaaatgaaccagaggcgttgttgcaagaaatgggcagtgccagtcagtcactcaactatgagctaggctatattaatgtcaataaccaagggattgattctcttcgttatcgccatgctatatctgaaggcaaagcgttagctcagctattacgcatggatggacctcgcaccgaggttcttcagcgcggtactgaaattagctatttcgaacctggcttcgacccttttactctggccggtgatcacatagtcgatgctttgccttccatcgtgttttctaatttcaaaaatctggccaaatattacgactatattgccgtggggcgagcgcgcgtagccgatcgtccctgccaggttattcgtgttgtagccaaagatggcacgcgctatagctatattatctggctagacgaaacgacaaaattaccgatgcgcatcgatctcttggatcgcgatggagaaacgctggagcaattcagagtgatatccatgggggtaggtacgccgattcaaacggtattgcaaggtatgaaagctcttgagctaccaccattgctcgctttacctgcgaaacaaaaagtcgatttcgtctgggctccagcttggctgccttcgggaatggtcgaagtttctcgcagccgtcgaactctaccgaatctggatacgccaacggaaactcgattgtataccgacggattgttcagctttacggtgaacgtaaacccggccgataagaatgctgtgaccgggcaatctttgcgtcaggggcgccgtaccgttgaaagtgaagtacgcaatggcgctgaaattaccgttgtaggtgagattcctcccgctacggcgaaacgtattgccggcagcgttgtgttaaaggctaagaaataatgatgaaggaatgggccacggtgatttcgtggcaacagggtatagcgttgctgcgctgtgagcctcatgccggctgcggtaattgtcatgcccgcggcggctgtggcagcgacctgttgaataaacttggcccagaatctcaacatcagcttcaagtcgctatcgatcaaccgcttgaaccgggtcaacgggttgaagtgggaatcagcgaaggcagcttgctacgttcggcgatgttggtttacctgacgccgcttttcgggctgattgccggtggcgcattatgtcagaatatctttgtgaccgaggcaatgaccgcggttggtgcggtattaggcggaatagccggttttttacttgctcgaaggctggcggctaaggttgaggagcgggctgattatcaaccggttgtattgcaaataggtttaccgccgacggcgctgagaatccagcaagattgatttcaaattagtgatttatcgggctgtgataggctggtatgcggttttgaatcatatgttgaattaaggcaataaacagatctgcgctgattaattccgcataatttatcgaaaataaaacactcccttcatcatcaagcaggcgtatcgactcgttattattgcccttactcccagtttcaattctccgtatattctcgatatcaatgacgcgttgctgcgtggttaaagtgcgtgcgttcagcctaatggcatggggaataacctcaaccaggtcatgatcaataaattgattaaaccaagacggttttttgttaaccacatcaaagttgattatttctccctgaaatagtcgggtaagacaggcgtcgccagcatggctaacctgttgataaacgatatttcgcatcaaggggttagctcccatgatattagaaacgataatattccattgctggtggtgtgaggcgcgaaatgccattgcgtttatctttccccttggattaatccccaagtggaaatggtaaatatgcgtgattttatcaaaaggaatgaaataaactttttcactgtaatgattaaatacccgaacgccattctcatataagaaataggtaaagtccggcgtgatatataaccgggaataaagcaggacgctcagggataatgccgccagcagaatgcacaacaccaataatattgaaggcgtagaaaatacattggttgccgttgccaatgtgataatcaccagtgtcattactataataaaggcgacggaagccagtgtcagttttgagtttttcttactaaactcgtggcggctgagaattgggccttcatcgatcatcagacctccttaatggcgataaaacggtttcaccatttaggttattccaaggtgatttttatattctaggtgaggcgaatattgacgatatgaggtttttcctaaagtgaatgggtatttctgaaaagacatcagttacctcaatgagaaaataataagtgacttaggaggagagccaagaagagaatgacgtaggtttctttgagcatatctcccaaatccgcccaataaccactttatttaaatggatttaaactctgatataaatcagcaacataaaaatacggcgcgttaagctttaatgcgactatcctttaagccgagcgactcgcggttccggtattcatattaatgccaatgatgggccgctattgctctcgaggagtgtcctgacagagcgacttgatttcatctgaaagcaaggataatagtaaggattggcatgaggatgactaggttttcattgtcttgacatgtagaataccgcgacttaggcgaaagacagccaacctaacaacttacaatactgactgtcgctttatgtccatgcgtgtgtccataggcgaatgattcagaaataccaaggcagaaaaacttttataatgaagcatatacgaaatttctccattattgcccatattgaccacggtaagtcgacgctgtctgaccgtattatccagatttgtggcggtttaagtgagcgcgaaatggccgcgcaggttctggattccatggatctggagcgtgagcgcgggattaccatcaaggcacaaagcgtgaccttggattatcgtgctcaggacggtcaaacttatcagctcaactttatcgatactcccggtcacgtagacttctcttatgaggtttcccgctcgctggcggcctgtgaaggcgcactgctggtggtggatgctgggcagggcgttgaagcccagacattagccaactgctataccgcgatggaaatggatctggaagtggttccggttttgaacaaaatcgacctgccagccgccgatcctgaacgcgtagcggaagagattgaagatatcgtcggtatcgatgctgctgacgccgtgcgctgctcggcgaaaaccggtgttggtgtacctgatgtgcttgagcgtctggtgcgtgatattccgccgccagagggcgatccggaagctccattacaggcgctgatcatcgactcatggttcgataactatctgggcgttgtttctttgatccgtattaaaaacggtaccttgcgcaaaggcgacaagatcaaagtgatgagcactggccagacctataacgctgaccgcttaggtatcttcacgccaaaacgtattgaccgcgaagtgttgaactgtggcgaagtaggctggttggtctgcgcgattaaagacattcttggcgcgccagtcggcgatacgctgacgctggctcgtcaaccggcggaaaaatccctgccgggctttaagaaagtgaaaccgcaggtttatgccggtttgttcccaatcagctctgatgattacgaaagcttccgtgatgcgctgggtaaattgagcctgaacgacgcgtctctgttctatgaaccagagagttctactgcgctgggttttggtttccgctgtggtttccttggcttgctgcatatggaaatcattcaggaacgtctggaacgtgaatacgatctggaactgattaccactgcgccaaccgtagtgtatgaagtgattaccactagtcaggaaaccgtttatgttgatagtccgtctaagctaccggcactgaacaacattgaagagttgcgcgagcctatcgcagagtgtcatatgctgttgccgcaagagtatctgggtaacgttattacactgtgtatcgagaaacgtggcgtacagaccaacatggtttaccacggtaaccaggtggcgctgacctacgaaatcccgatggcagaagtggtgctggacttctttgaccgcctgaaatcaacgtcacgcggctatgcgtccctggactataatttcaagcgtttccagacctctgacatggtccgcgttgacgttttgatcaacaacgaacgtgttgatgcactggctctgattactcaccgtgacaacgctcaatatcgtggtcgcgatttggtcgagaagatgaaagagctgattccgcgccagcaattcgatattgcaattcaggcggctatcggcaaccacatcattgcgcgttcaaccgtgaaacagctgcgtaaaaacgtattggcgaagtgttacggcggtgatgttagccgtaagaaaaagctgttgcagaagcagaaagacggtaaaaaacgtatgaagcaggtgggtaacgttgagttgccacaagaggctttcctggccattctgcacgttggcaaagacggaaaataagttgtaaggagtttgaatggctaacatgttcgccttgattctggccgtagctacgctggtcacagggattatctggtgtttcgagcgtttcaaatgggcgccggcacgtcaggcaaaaattgcggctatcaatgcccaaacagcgggcacggtagatgagaaagctttatctaaagttgctcgtcagcctggctggatcgagacctgtgcttcgattttcccggtgctggcgctggtgtttatcgtgcgttcattcatttatgagccatttcagattccgtctggatcgatgatgccaactatgctgatcggcgattttattctggtggaaaagtatgcctacggcattaaagatcctattacccagacgacgctgatcccaacgggacatccgaaacgcggcgacgtggtggtatttaagtatccgctggatcctcgggttgattacatcaagcgtgtggttggtttgccgggagatcgggttagttacgatcctattgccaaacaagtaacggtgcagccagcctgcaatactggtcactcttgtgatagcgcgttagccattacttacagcgaatctgtgccgagcgaattcgtccagactttccgcttcagcggtatgggcgagtcttcggccggattcttccagattccgaccaataagccggttccagatgatggtgtacgtttgcgtcagcgcagcgaaagtttagggccggtttcccatcagattctgatggtgccgggtcggaacgatcagattggtgcttattatcagcagccagaccagccgcttggcgtttgggtggttccggaaggtcactactttatgatgggtgataaccgggataatagtgcggatagtcgcttctggggcttcgtccctgagcgcaatctggtgggtaaagccactgctatctggatgagttttgaaaagcaggaaggtgaatggccaacgggtgtgcgtttaagccgtattggtggaattcattaatctgagcggtatcctgattgactggcgctgttggctggcaataatccgataaatcccgataagctgatcgacatcagcaatttgggcggtgaatgccccaacaacgccagaatttcaattaataagggtatatataaacgcagcattatgtttccacacgttgtagaataacctttcgagcgataaaagttggcttcctgttggaggcactgcaaacgaaacagctttgtgttggcttgggcgaagcagacctgttccgtatgctgtagtttttgacgcattcttgatctattggtaactcatgaatcccatcgtaataaccaggctacagcggaagctgggctatacttttcaacagcaggatctcttgctgcaagctctgactcatcgcagcgccagcagcaaacacaatgagcgtttagagttcctgggtgactcaattctgagttttgttatcgccaatgagttgtatcaccgcttccctcgcgtagacgagggcgacatgagtcggatgcgggcaaccttggttcgaggcaatactctcgccgaaatggcccgtgaatttgaccttggcgaatgtttacgccttggcccgggtgaattgaagagcggcggttttcgtcgtgaatccattttggcagatacggtagaagcccttatcggcggtgtgttcctcgatagcggtattcaaacggtcgaacggctgattttggactggtatcgtagccggttagatgaaatcagccccggtgacaagcagaaagacccaaaaacgcgtttgcaggaatacctgcagggtcgccatctgccgttaccttcttacctggttgtgcaggttcgcggagaagcacacgatcaggaatttactatccactgccaggtcagtggcttgagcgagccggtagtcggtactgggtcaagtcgtcgtaaagctgagcaggcagcagcggaacaagcgctgaaacagttggagcttgaatgagcgaagtagaaaaaacgtattgtggttttattgcaattgttggtcgtccgaacgtgggcaaatcaaccttgctaaacgagttgttgggtcaaaagatttccatcacctcgcgtaagccgcagacaacccgccaccggattatgggcatccatactgaagggccttatcaggctatctatgtggataccccggggctgcatattgaagaaaaacgtgccatcaaccgtttgatgaaccgagcggctagcagctcgattggtgacgtggaattggttatttttgttgtcgaaggaactaactggaccgccgacgatgaaatggtcgtgaataaactgcgcagcttgaaatgcccggttctgttggctatcaacaaagtggataacgtcacggataaaaccaagctgttgccacatattcagttcctgagccagcagatgaatttccttgatgtggtgccaatctctgcggagaaaggcatgaacgtggacaccatcgcggccatcgtgcgtaagcatatgccggaagctgaacatcatttcccggaagaatacatcaccgaccgttcccagcgctttatggcgtcggaaattattcgtgaaaaattgatgcgcttcctgggtgaagaactgccttactcggttaccgtagaaatcgagcagtttgtgccgaatgaacgtggtggttacaacatccacggtctgattctggttgaacgtgaaggccagaaaaaaatggttatcggtaacaaaggtgccaagattaagactattggtatcgaagcccgtcaggacatggaacaaatgtttgatgccaaagtgcatcttgaactgtgggtgaaagtgaaatcaggctgggccgatgacgaacgtgcattgcgcagcttaggctataccgacgatctgaaataagactcgtcgatggaaggttggcagcgcgcatttgttttgcatagtcgcccttacagcgaaaccagcctgatgctggatttgtttaccgaaggggaagggcgcatgcgagttttggccaagggtgcgcgtggccgacgttccaatttaaaaggctgtttacagccttttacgccattactggttcgctgggccggtcgtggggaagtgaaaacactacgtaatgcggagccggtttctctggcgctgccactcagcggatcgatgctttacagcgggctgtacgttaacgaactactgtctcgcgtactggagcacggtactaactattctgcattattcttcgattatctccattgcttacaagcccttgccgcaacggacggttcccctgaacacgctttacgtcagttcgagctggctatgctatccagtctgggttacggcgtggattttctccattgcgccgggagtgggcaagccgtcgctgacaccatgacttatcgctatcgggaagagaaaggttttatcgccagtttggtggtggaccactacagttttaccggacggcagctacaggcattggccagtcgggagtttcccgatgctgatacattacgtgccgccaagcgttttactcgaatggcgttgaaaccttatttgggcggtaaaccgcttaaaagtcgtgaattattcagacaatttgtaataaaacctcctgccgacccgacgcagacatcctgattttattgatttttaatccgttctgtatcaactttccccgatcctaacctatccgctgcgcctgcactcggtgtaaactgcgggctgttaacctatcttactacgggcttttctggagggctgtcatggctgatttgctgctaggcgttaatatcgatcatatcgctacgttacgaaatgcgcgtggtactcactatcccgatccggttcaggcggctttcattgccgaacagtctggtgctgacggtattaccgttcatttacgcgaagatcgccgtcatattaccgatagagacgtacggattttgcgtcagaccattcagactcgaatgaacctggaaatggccgtcacggacgagatgctggacatcgcctgcgacattcagccgcacttttgctgtctggtgccggaaaaacgtcaggaagtgaccaccgaaggcgggttagacgttgccggtcagatcgacaaaatgacgttggctgttggtcagcttaccgacgcggggattctggtttcgctgtttattgatgccgatatgcgccagattgacgccgcggtggcggtaggtgcaccttacattgagattcataccggcgcttatgctgatgctaaatccgatctgattcgtcaggcggagctgatgcgtattgccaaagcggcggcctatgccgctggcaaaggtctgaaagtgaatgccggacacggcctgacttatcataacgttcagcctattgctgccttacctgaaatgcatgaactgaatatcggtcacgcgattatcggccaggcggtgatgaccggcttgccggctgcggtttccgaaatgaaaaccttaatgcgggaagcgcgtcgctgatggctattttggggctgggtactgatattgttgaaatctcacgtatggaagctgtggtgaatcgcagtggagagcggctggcaaagcgagttctcagcccggcagaatggcaacagtatcagcaacatcagcagccggtgcggtttctggctaagcgttttgcggtgaaagaagcggcagctaaggcgtttggcaccggtattcgcaacggactggcattcaatcagtttgaagtcgtcaatgacgttttaggcaagccgacgctgcacttacatggccgcgctgcggagctggcgctggagctgggcgtggcatctctgcatgtttctttagcggatgaacggcgctatgcctgtgcaacggtgataattgagagttaatcaggatttaatcgattcggatcttggcaagggcgtatttatacgccctttgttgcaactgcggcgcggttacaggcggtcggcgtgatgcagcagaacgtatttatcccatagctgctcgttagtttcgacgcaggccggatcggtaataatagtgttatcaatcgggcaaaccaattggcaggtaggcgtttcgtagtggccgacgcactctgtacagcgcattggatcaatttgataaatttcttcgcccatcgtaatagcctgattcgggcactccggttcgcacatatcgcaattaatgcatttacgcgtgatcaacagggccatgagttcgctacctttggtgtgggggacataaatcagccggcgattataccgctatcatcgccttagaccagttttttcaccagatttgcgctgtggttgatgtggtcttgcgcctgatcaaaatcttgctggatgattgccataaagagcaaatcggtgagagcaaactgagcggtgctggaggagattgccgcgctgcgaatggccggttcttccgcaatggtatacaaacaatgatcggcgcgttgctgtaggccattaggggaaaaactggtgagtgccagcaccttggctcccgcagcccgcgcttcctccgccgccagattcacttcccttcgttcgccgctgaaagatatggcaagcagtaaatcctgtggactcatggcctgaaccgtcgctaattgtacgtgcatatccgcttcggctaccgccataatgccgattttcaacaacttataggataaatccttcgccacaagtccagaagcaccgatccccagtaggataactcgacgagcatttttcagcatttccagcgccatgagcaggcgttcttcactgttgatatccagcgtggcgcgtagagcggcctgcttttctgccaatagcttttcacctacggtttttaaaccatcggtactgagaatctgattatgtactttcaccgcggcctgcggtgtggccaccacttcgctcaacgccagttttagcgccggaaagcctttatatcccagtttttgagcaaatttcactacgccagactggctgactccggccatttgcgccaatttctgcgagctgagatgccgcgcctgttcaggattttccagcagaaaatcagccagttttcggtcgttttgcgccaatgtagggtagatctgtcgtatgcgtagaagactgctcataacaccattcctgaaagcgggaagacattctgccatgtttagcgctaaaaaatcagatcgggcgcatggatagggttaacttaccgatttttgtgatctctgctctaaagatagccaaaaacactcgccttgttgaatataatattcaattataaatatattaatgtgaattaaaaattcaatgaggtgacgtatgaacttaggtactttggtatcagaaagccgtaatccggcaacaagggatctggataaattatccaccctggaaatggtggagcgttttaacgatgaagatcgtaaggttcccgatgcgattcgtttagtgttacctgaaattgcgcaggcggttgatttagctgccgaagctttgaaggctggcgggcgtctgatctatctgggagcgggaaccagcggtcgtctgggcgtattagatgcatccgagtgcccacccacttttggcgtgcctcacggattagtgatcggcctgattgccggtgggccgggagccttactgaaggcggtagagggggcggaggacagcctgacattaggtgcggaagatttacaggcattgaagttaacctccacggatatggtggttggcctggccgcttccggtcgcacgccctatgtgatcggcgctttgcgctatgctcgcgagttaggttgcccaacggttgcgatttcctgtaaccctgactcacctattgcgcgggaagcgcagctggcaatttcccccgtagtagggccggaagcgttaaccggttcaacgcggttaaaatccggaactgcgcaaaagctggtgctgaatatgctgtctactggcgcgatggtgaaattgggcaaggtgtatcaaaacctgatggtggatgtaaaagccactaacgtgaagctggtggatcgcgcctgccgcatcgtggtggaagccaccggcgcaggaagggaagaagcggaaaatgcgctgaaacagaccgattttgaggttaaaccggcgattttgatgatcctgaaaggcgttggcgcagagcgggctcggcaggatttggcgcagcataatggttatctgcgcgccgctttatagcgctcagcctgaggatatgtggcaatggataaatcaaccgctttagcgcagcaaattttggtcggtattggtggcgaagccaatattcgaaaacttgaaaattgtatgacccgggttcgagttgaggttaaagacgacaatctgctggatttatctcatttgaagcagttaaccggagtcaaaggctatattaagcagggggaacagcatcagtttattgttggccccggcgcggcgtcgaaggtggttgagcgcatgcggggcctgatggttggaaaaacagaagacatcgctgaaaccgatgcgatcggtcgaaataaagcgcaggccaaagctaaatatgcggctccaatgagcggtgcgctgaagaaactggctgacgttttcatcccgctaattcctgcatttattgcttccggcttaattatgggaatagtgaatattctcaagcgtccggatatttctggcgatttagcgctgcattacccgaatattctggggttgttggcgatctttggcagtgcagtgtttgcgattatgaatattctggtgggcgtcaatgccgccagagtgttcggcggttcgcaggcaatgggcggcgtaatggccggtattttatccagcccggcgctggcgcaaattacgctgtttggcgaagcgttgcagcctggtcgcggtggagttattgccgttttactggttgtggcattgatgtgctggatcgagaaatggttgcgtaatcacctgcctgaatcgatagagcttattgtcaatccgttgttaactacgctaattaccgcctctttggctattttgctgctacaaccgctgggcgggtatatttctgaagtgattacccacggagtcaatttggctatcgatcgcggcggactgtgggtcggcgcgctgctgtccgggctgtttctgccgctggtactgtccggtttacatcagggattggtgcctattcacgtagagctggtgcaggctcacggcgccaatccgttactgccgatactggcgatggctggcgtagggcaaattggcgccgcgttggcggtactgatgaaaacgcgcaatgcgcgtctgaaaaaagtgattaaaggggctctgccggtcggcattttaggcattggcgaaccactgatttttggggtgacgttacctttaggtaaaccctttatcggcgcttgcttggggggggcaatcggaggggcgttaatcagctattggaaagtggcgacggtgataaccttcgggatttccggcctaccgctggctttgaccattatttccggcaaagtcatgttgtaccttttggggatggcaatcactattctggccggttttatatttacctggattatggggtttaccgatccagaagaataatagcgtaacgctgttcatggtaaggaaaaaggcggtagtatcactttaggatatcgctctgtcgacgcggatttggcagagcgaaagacattttgaggagtgataagttgatgccagaatcgaccttagcaaacatcgcgccgcaggccgctgaaggcaaacgcgttgtattttttgatttagacgggacgctgcatcagcaagatatgtttggcagctttttgcggtttcttactcgtcgcttacctcttaatttacttctggttattccgttattacccgtcgttgggattggcttactggcaggaggccgctgcgcccgctggccgcttagcctgctgttgtggagcatgaccttcggccgtagcgaatctcatctgaaagatctggagcggcgcttcgtgggggcgtttcgtcagaaagtggtgggttttcctgtagtaaaaatgcgcctgcggcagtatctggaacagcaagatacgcaggtgtggctgatcaccggttcaccgcagcggctggtggagcaggtttaccatgattctctttatctgcccaagttacatcttgttggtagccaaatggcgcgatgcaacggcggctggattttgccgctacgctgtctggggcaggaaaaagtggtacagcttgagcagcggctcggctctcccttgaaactttatagcggttatagcgacagtaggcaggataacccgttgctgtttttctgcgaacaccgctggcgggtgagtaagaacggcgaattacagcggttagagtgattgttttcctggaataaccgcagggtttgccgctgtttttcatgactttaaaggctcggttattgagttacgtcagttgttgcctcaatgtgttacatcggtattactatggcctaaacgccagattttttccgcgtagcgaccgagtaaccataagcttccgcccagaatcacgaaaaacagcgttttggtcagcgaatcccaaaacagttcgaaaaaacgggtgtacagattgatggctaaaaaggttaagccgaagccgcgaagcatggcgtcatctcgcttcaaacccagccatatagcggctcctgccgccagagcaaacagtaggctccaatgaaacagcgcgatctggcgcacctgataccagccgtcaatatcaccgtaattgccgaagatcgacagtaaccataaagcgagaaataggtatagcagccccattgcttgtgaaacccgttccagccgccgctggcgcagcgggttttgggccagcagaacgaccgatatcagtatcaaaccgaaaagaataaagcgcagcgggtagttcaggcccagccaataagctccccagccggaaaggtagcccgtttctgcgccaaaggcgttccccagagataacagagcaaatagccagaccaagggggagcggcctagccagccgattagtgcataaattcccgcaccgagcagcaataatagagaaacgcggccactgccgttatccagccaaatgcctaagtagcctaaagatgttgcggtaaataatacgccgagaaacagcagggcttcattgctgtaaattttatctgggctgaggcgataacggcgaaatccccaataatagaatgtaacggcaatccctgcgcagattacggaaatggccggagcgtcgaagcgcaggaattggctaatccaggcaatgagaacgctgtcggcaaacaggctggcaacggcggtagccaggcaagcgagcgcgcctaaaaaggcatagctcgccagtctgcgccaatcaaaaggctgaatcacaacgtgctttaacaggcgctgatgttcttccggcgcaatgacgccttcactggcccagccatctagggttttctgtaccaccgccgcattttttttgctgagtttcatatccaggttcccttgtatgacaggttctctcggcggtttaagccattgcttcgggtcagcaatgtgaaggtgacggcgagattttctatgtattcttcactttactgtattgatgacttttattgagtataagtaatagatgaatagcccggtagcgatagtctgagtacttcgggcggacaaaatccccgttctgcgcctgcgctgtgtataatgcccgccgcaaaagtgcctgagaggtgaatgtgtctattgaatataatgatgaatactggatgcgtcaggcattagagctggcgcagcgcgcgcaggaagagggcgaagtgccggttggcgcagtgttggtgttagataatcaggttattggcgttggctggaaccgacctatcatccatcatgatcctactgctcacgctgaaatcatggcgttacgccaaggcgggcaggcgctacagaactatcgactgcttaacgcgacattatatgtcacgctggaaccttgcgtgatgtgcgccggagccatggtacacagccgtattcgtcgtctggtttacggtgctgacgatgtgaaaaccggcgcggcaggctcgttggtggacattttgcgtcatccggggatgaatcatcaggtcgaaattacttccggcgttctggctgaggcatgttctgctacgctgagcgcctttttccgccagcgccgggagcagcaaaaagcgctgaagcaggctcgccgcgccgctgcgcaaaacgagccagaatagtccttgaatcggtcagttattaatcgaccagcccggcccaaccaccggataggctttgcctaattcagcttcgatagccgcactttgcgcggcttttttctctttatcctgcaaataacccaccaaactgacctgatagcgccggatgttttccacgtagttataagcctcatgcccacgggcatagccgtaagtcgtactcgggtaatagcgcttctggctcagcatcggcaaacgcatttttacatctacccagctatctggattaccgttctggcttttggtcagtttacgggcatccagcatatgaccataacccatattataagccgccaatgcaaaccaaatccgctcgtcttccggcaccgtttccgggatctttttcatcaaacgttgcagatataccgatccgcctttgatgctttcctcagggtccagacggtcttttacgcccaaaccgtctgcagtggcgcgggttagcatcatcaggcctctgacgccggttggtgaggtcgcctcgggattccagtgtgattcctgataggcgatggccgctagcagcttccagtcgatttcaccggcgtgcttctcaaacagcggctggaaggttggcaataccgtgtctatggctcttaggaaggttttggtatccacataatcgaagctgccaacgtggcccagatatttttcttctaagcgcgccagactgccgtcttcaaccatttggctgtaaaaatccagcagtgcggcatacaggctgtcatcatcgctacgcttaaagtaccaggtgaccggttcttcatcggtaacatcgaaagctaccgctaactgcgggtggatgcgctgcaacagggcaatagtgatggaatcgcctatagtgtaatccagcttgccatcggccacctgctctaagagttctttagccgagcgatcggttgaggactcccagctcaaattcgggtacttgccctgttttagctgttttagcgccgccatgtgcgcagaaccggcggccacggtcagttgcccttgcagatcgttaaaggtttttgggcgggttttgcccaaccgatacaccaactgttgggaaaccgaatagtatgcggggccggtgcgcgcccgattcaggcgttcactgttataaatcaggcctgcggccagcaggtcggcgtcgttgttgtccagatcttcgaacaggtcatcgatattgttacgggtcgtaaccaccagcttcacgccgagataatctgcgaagcgctttgctagttcgtagtcaagaccggtagggccatctttacctggggtgtagatcagcggtgagttcatcgtactgatacgaagctctccgcgggctttgatctggtcgagttgtccctcctgaccgttgcgccaggaaatattcggccatagcgcaagagccagaagcaaggtaacaacaccgataaaaaaataatttaatttaaggcgcgtcaaatagttgtctctcggcagcgcggggttgtgcgttatatataagggcgatttaacatggttaaatccccagtgcgggggcattttgcgcaacaaaacgccagtgtgcaactttattgacactttatgataattcgacgacttctcgcgctattatcaataatagatacgcaaacggtttcgtcggaggccgagattctctataatggcgcgcgttttcccctgttgcgcccaatgaagtgctgttccagctgcttcgaagacgagagaaacttagattatggaaatactgcgtggttcgcccgctttgtcggcttttcgcattaccaaattgctgtcccgttgccaggacgctcacctgccggtgagtgatatctacgccgaatatattcattttgccgacgttagcgcgcctcttcgcgctgatgagcacgccaaactccaacgacttctccagtatggtccttctctccctgaacatgcccctcaagggcgtttgctgctggtcacgccgcggccgggcacgatttctccctggtcttccaaggcgaccgatattgcccataactgcggcttgtctcaggttttacgtctggaacgcggtctggccttctatattgatgcgccagagctgaccgaaacccagtggcagcagttggtcgctttgttgcacgaccgcatgatggaaacggtatttaccgatttgcagcaggcagagcagctgtttgctcatcagcaccctgcgccggttcagcgggtagatattctgggcgaaggccgcgcagcgctgaagcaggctaatatcaagctgggtctggcactggcggaagacgaaattgattacctgctgaatgcctttaccggtttggggcgcaacccgacggatattgagctgtatatgtttgcgcaggcgaactccgagcactgtcgtcataaaatctttaacgctgattgggtgatcgacggcgtggctcagccgaaaacgctgttcaaaatgattaagaacactttcgaacaaaccccggattacgtgctgtctgcttataaagacaacgcggcggtaatggccggttcgcaggttgggcgtttcttccccgcgccggaaaacggtgtttatgattatcatcaggaagatgcgcatatcctgatgaaagttgaaactcataaccacccgacggcgatttctccttggccgggtgccgcaaccggttctggcggcgaaattcgtgatgaaggtgccaccgggcgcggtgctaaaccgaaagccggtctggtcggtttctcggtatctaacctgcgtattcccggttttgaacagccttgggaagaagatttcggtaagccagaccgcattgtgacggcgctggatatcatgaccgagggtccactgggtggcgcggcgttcaacaacgaatttggtcgtccggccctgctggggtatttccgtacctatgaagagcgggtcaatagccataacggcagcgaactgcgcggctaccataagccgatcatgctggcgggcggtatcggtaatattcgtgccgatcacgttcagaaaggcgaaattaccgttggtgccaaactggtggtgctaggtggcccggcgatgaatatcggtttgggcggtggcgcggcatcttccatggcgtccggccagtccgatgcggatttggattttgcctcagtacagcgcgacaacccggaaatggagcgtcgctgtcaggaagtgatcgatcgctgctggcagttgggcgagcagaacccgattctgtttattcatgacgtcggtgccggcggtctttccaacgcgatgccagagctggtgagcgacggcggccgcggtggtcgctttgagctgcgggacattctgaacgatgagccggggatgagcccgctggaagtctggtgtaatgaatctcaggaacgctatgtgatggcggtagcgccagcgcaaatggcgcagtttgatgaaatctgccgacgtgaacgcgcaccctatgcggtgatcggtgaagcgacggaagaactgcatttgacactgaacgatagccatttcggcaaccagcctatcgatatgccgctggatgtgctgctgggcaaaacgcctaaaatgctgcgggatgtcaccagccagcaggcgcagggcgaagcgttgaatcgtgctgaaattagcattgccgatgcggtaaaacgcgtgatgcatctgccagcggtcgcagaaaaaaccttcctgatcaccattggtgaccgcaccgtcaccggcatggtgactcgcgatcagatggtggggccttggcagattccggttgccgactgtgcggtgaccagcgccagtctggatagctattacggcgaagccatgtctattggggaacgtgcgccggtagccttgctggactttgccgcttccgcgcgtttggcggtgggtgaggcgctgactaacattgccgcgacgcaaatcggcgaaatgaaacgcattaaactgtcggcaaactggatgtccgctgccggtcatcccggtgaggacgccggtttgtacgaggcggtgcgcgccgtgggtgaagaactttgcccggcgttgggtatcactattccagtgggcaaagactctatgtcgatgaaaacccgctggcagcaggatggcgaacagcgcgaaatgacttctccgctgtcgctggtgattaccgcctttgcccgaatcgaagacgtgcgtcatacggttacgccgcagttgcgtaccgataaaggtgacaatgcgttgttactgatcgatttaggcgctggtcacaatgctttgggggctacggcactggcgcaggtttatcgtcagctcggtgacaaaacggccgatgtgcgcaacgtggagcagctggctggcttctttaacgccatgcagtcactggtagccgatcagaccttgctggcttatcacgaccgctctgacggcggcctgttggtgactctggctgaaatggcctttgccggtcactgtggtgccgaagtggatattcaggctttgggtcaggatgcgctggctgccttgttcaatgaagaactgggggcggtgattcagattcgcgccgagcaccgcgcggccgttgaacaactgttcgctaaacaggggctggcagagtgcgtgcattacttaggacgcgcgaccgtcggagacgatttcgtgatccgcagtggaaacgacacggtttatcgtgaaaaacgcagcactctgcgtctgtggtgggcagaaaccacctggcagatgcagcgcctgcgcgataacccagactgcgccgatcaggaacatcaagccaagcagaatgagcaggaccctggcctgaatgtgaaactgacctttgaacctcaggaggatattgctgcgccttatattcttaaacaggttcgtccgaaagtggccgttttgcgtgagcagggcgttaactctcatgttgagatggcggcagctttccaccgcgccggttttgatgcggtagacgtgcatatgagcgatttgctggctggtcgcatcgatctgcgaggttttcagaccctggtagcctgtggcggtttctcttacggtgatgtattgggtgctggcgaaggctgggccaagtctatcctgtttaataaccgcgtacgcgatgaatttgccgagttcttcctgcgtccggaaaccctggcgctgggcgtgtgtaacggctgtcagatgatgtctaacctgcgggaactgattccgggggcagaacattggccacgctttgtacgcaaccagtctgaccgctttgaagcgcgtttcagtctggttgaggtggctgacagcccgtcactgtttatgcaggatatggttggttctcgtatgcctattgcggtttcgcatggtgaagggcaggttgaagtgcgcgatcggcagcatctggccgctttggaacagcacaatctggtggcgctgcgctttgtgaataataagggtgaagtgaccgagcagtatccggctaaccctaatggctcagtgaacggtattaccgctgtcaccagcgccagtggccgtgccacggtgatgatgccgcatccagagcgtgttttccgcaccgtgagcaattcgtggcatccggaagagtggggcgaagatagtccgtggatgcgtatgttccgtaatgcgcgtaaacagttaggctaacgatccgttggtttaaatatctaaggggggcgaaatgcccccttttgcttatcgatatcacttatcgatattgattgacgtttggtttgtctgaatcggtcccaatttcttatcacaccgtgaagctatagcttatttctttcatttctttattattatctaagacttcaataattaacctatatgttcctggttgaatattgtgcattttgattcttattggtatcttgtcattattaataaaaccattaatgctgattagctctgcgttattgctgttgacgacataaatgtaatagttcagtctgccatgggcttcaaagtcgaatttaattttatattccgcagcttcttgactgtaataataatgtaggtctgttatttcaaagtcaggaatataactgatatgagataacggcctaatccctgaaatggccggtaacatagccaattgcccggtactgatgacggtcgagcgaatgtcttggcgagtgcgagttacatcattggcaaaggcggtggcagataaaatgattaaggtcgaacacaaaaatccgagtttatttaccgtcatacatcctcctgtgttatctgcgtcatggataacatgagtggcacttttattactgatagtgatttttttcggtgaatattatgaagcgttgcgttctatttcaggttttcatagctatgaaaatccctatgtaattttatgttaattaagattcagactgtctggttataaagatgtttggctgtgaagtagtataaaattcattgtgttttcaaaactgatatttttcgtattggaaactagccgaaatctaattacagatgtccactcatagttcgtcctcttgtattcgacactgcattaagacactgcattaaattgttcattaatcagttaactctctgttggcatcgggttctctggctgcgaggtagagcagccattttttgcctcgccggatgcggagctttgttccgagctagcgatgggttccttcgtcgacagcaaccgccgacagcaactctttgcgcgggcatctggctatgatgctgacaaattttccttatctatgaaatatcattatttataagtaacgagattaggtttgatgaattcccacatgagatgaagatctcaatttgttgaaaaatatatatttttatttttgtgtcggtaaattgcgacaacagcataaagcggtgtctcaaataggagacatataacttcatgatttttaatgtttttattattgatgcttttgggtgtcgtgaattagagacagaaggctaataacgcgttaactgtttaaccgttgtttttaagttataattatgaattatttaaataactgtttattttcaatgtcttagtatttttattttaaagttggcacggtaactgcattatcttaatcagttgctcattcacctttttatgacagccccgcagttaagcggaatatgcgcttcataagccatcgaatgacgcctaagaatggtgcctatcgtccacctaaaccgatattgccgcgcaagcgctttatcaagcatcggacgacacgttgagtgaggcaccgcctatgtcctactgtgatgaagggttcatcaatattggacatgtttggatgctattcgtctcatccccccgatgattgcttcggctcatcaaactggaggcgattttcagggcatccacatattcttgctaatgggggcaatagtgttattgcccctgttaagcaaatcagcaataccttcagattcgttcaaacatcgatatcgcaatcatttctcattcgattgagtgttgatacaacaggctgatcgcatcgatgaatcaaaattgtggaaaccagtttcctattaaaattaagcactttgctcatagcaggtgctttttttttgctcgaaaatcagcggtcgatgatttgttgatgaaatagtgcgggatttatgcggtaacagacattgtaatcctctgagagtcggttagcatcaaagcagaataataggtaatgagatgatttcgttgaaaagatggcgtttattccctcgttcgttgcgtcagctggtactgatggcgtttctgttggtgcttttacccttgctggtactggcttatcaggcttaccaaagtttggatcatttaagcgagcaggcggcagatatcaaccgtaccacgctggcggacgcccggcgcagcgaagctatgaccagcattgctctggaaatggagcgtagctatcgccagttttgcgtattgggcgatccgacacttgccaagctgtatcaacaccagcgtaaacagtatgcccaaatgctggatagccatggttcgatcttgcctgacgcccactattatcagactttacgtggcttactcactcagttggaagaaataaagtgccagaacagtgggccagatgcgcaatcttcggagcaactggaaggtttttctcgctctaacgccgaaatggttcaggccactcgtgacagtattttctctcgtggtcagcagttgcagcaggatattgctgaacgcggacagttttttggctggcaggcgttgttgctatttttggtcagcgtgattctggtggtgctattcacccgcatgattatcggcccggtgaagggaatcgagcgtatgattaatcgcctgggagaagggcgagcgctaggcaatacagcgttgtttaaagggccgcgtgagttgcgttcactggcgcagcggattatctggctcagtgagcgtctggcgtggctggaatcccagcgacacgagtttttacgccatatttctcacgaactgaaaacgccgttagccagtatgcgtgaaggaacggaattactggctgacgaggtcgccgggccgttgacgcaagatcaaaaggaggtggtagccattttggataacagtagccgccatttacagcaactcattgaacaattgctggattataaccgtaagctggcagacggctctggcgagcatgaaaatgtcgaactgttggaagtggttgaaggggttatttctgcccatagtttgccagccagagccaagcaaattcgtaccgaggtcgatctgcaagcggatatctgctgggctgaacccacattattaatgcgagttctcgataatctctactccaatgcggtgcactatggcgaggaatccggtaccatttggatccgcagccgtcaggtgggaaatcgggtacaaattgatgtcgctaatactggcactccgattccgctagccgaagaaaccatgatatttgagccttttttccagggaagccatcagcgaaaaggggccgttaagggaagtggactgggactgagcattgctcaggattgcatcagacgtatgcagggcgaactgcatctggtagaacaggatgatgcagccgtctgtttccgcattgaattgccattaaccgccgagaatgaataaataatgtacaagtggtctgtcagtcgcttttttaaaaagaccgaatctttgccgcgctccgccctggaggctgtcgcaacgccatcttatcgtaaggccgcttttttggggacgctgttacttgccccactactattgagtggatgtatcgatcgttccgccaacggacgcttttcccatgcggtgcagttggtgattcccgaaagcaaaattgtggattaccgcaccgctcaatgtgacacgctgtgggatatcgaagataaagaagttctggagaattcgctttattggctgagagcgatggactgtgccgagcgtttaagcaccgcgcagtccagagccttggccaaatctatgcaaaccctatcctggtcaacggcgtttaagcagggcattttgatcggcagtgctgatccatcaatggccgagcgtcgtcagatcgttgagcgtctaaatagctatagccagactttccccggttctctgcgcccgctgattcagctatggcgggaacagcaagtgctgcgtattgctctttccgaagaacgtgcccgttatcaacgtttacaggatgaatcggacagccagattgatcgcctgagggaaagtcaggtgcgtctgcaatatcatttacaggacaccacccgtaagctggaaaacctgaccgatatcgagcgtcagctttcttcacgtaaacaactgcaaaatgaaatttctgagcctgaggcagaaatcaaagccgccgctgggtctaatccagagccggccaaagcggctgaaatgaaagaagagaaagcggcagagaaaaagtcggtagaggcaagatcggtagaaacaaaatcgatagaaaccaagccggtggaaaccaagccaacagaaaccaaacctgcggcagaaaaatcggccaagccagtggaacccgcagctcagccgaccactccggtaacagcgccggaggccaaaccggcagaaacctactcgcctccggccacccagccgtcacccgcttccaaaaaggagtccgagccacatgacaccacgcaaaccggccaatctactgctggttgacgatgatcccagcctgctcaagctgctgggaatgcgtctgacaagtgaaggtttccatgtcaccacggctgaaagcggtcaggaagccctgcgcttattgatgcgcgagaaaatcgacttggtgatcagcgatttacgcatggatgaaatggatggtatggcattatttgccgaaatccaaaaatatcagccgggtatgccggtgattattctgaccgcgcacggttctattcctgacgccgttgccgccactcagcagggcgtattcagcttcctgaccaagccagtcgatcgcgacgcactgtataaagctattgatgccgcgctcgaactttccattcctgccggtgatgatagctggcgagaagccatagtgacccgtagtccgctgatgctgcgtttattggagcaggctaaaatggtggcccaatctgacgttagcgtgttgattaatgggcaaagcggtaccggtaaggaagtgttggcgcaggcaatccacggcgccagtccgcgcgctaaaaaagcctttattgccataaactgcggtgctttaccggagcaattattggagtctgaactctttggtcatgctaaaggggcatttaccggcgcggtaagtagccgggaaggcctatttcaggctgcggaaggtgggacgctgttcctcgacgaaatcggcgatatgcccttatcattgcaggtaaaactgctgcgagtgctgcaagagcgcaaggttcgtcctttgggcagcaaccgagatttggatatcaacgtgcggattatctcggcaactcaccgtgatttgccgaaagcgatggcaaaaaatgaattccgtgaagatctttactaccgtttaaacgtcgtgaacctgaaaattccggcgctgaatgagcgagcggaagatattccgctactggctaatcatctgctacgtgaatccgccaaacggcataaaccttttgtgcgcagtttctccaccgatgcgatgaaacgactgatgaccgccagctggccgggcaacgtgcgtcaattggttaacgtcatagagcagtgtgttgctttgacctcggcgccggttatcagcgaagcgttggtcgagcaggcgctggaaggggaaaacaccgctttaccgacttttgttgaagcgcgtaaccagtttgagctgaactatttgcgtaaactgctgcaaattaccaagggtaacgttacccaggcggcgcgaatggcaggccgtaaccgcactgaattctataaattgttgtcgcgccatgaattggacgccaacgatttcaaagaatagtgctttctttcctcggaacccgattggaaaaggcgttcggcgggttctaaacaaatgaccgggaatgatttacacttcggtctttgttgtggcatagcagaattgaaaccaatatgaacagaacactttccattgcgttagcccagcttaatctgctggttggcgatattgaaggcaacaccgagcgtatgttgcaaaccttacatgagcagcaaaaggccggtgccgatctggtcatgttttccgaactggcactgtcgggctatccaccggaagatttactgtatcgggatgatttctacctgcgctgtgaggcacagttagaccgtttacaggccgcagcgcaaaagacggcggttctggtagggcatccgtggcgtgaagggaataagctgtacaacgccctgtcactgttctccgaaggtaaattgcttggtcgctacttcaaacaacagttgcctaactacggcgtgtttgatgaaaaacgttatttcactcctggcaatgaaagctgcgtggttgagctgaaaggctatcgtttagggctattaatctgtgaagatctgtggttcaaccagccggtagacgctgcgaaagctgcaggtgcagagctgctgctgtcgattaacgcctcgccgtataaccgtgaaaaaccttatattcgcaaaacgctgatggcttcccattgccagcgtaccgatttgccgctgatttatttgaatcaggtgggcggtcaggatgagctgattttcgacggttgttcaaaagtgtttgattctaaaggtaatatgacgcatcgtctggccgcctttgcggagcaaacgacgctatgccgcttccaggatttggtcgtcgagcccatggcggcaccggcggcggggttgtctccgctggctgaagtgtatgaagctctggtgctggcagtgcgtgattatgtgaccaagaacggctttaaaggcgcggtactcggcctttctggcggtatagattcggcgcttacgctagcgattgccgtagatgcgctgggtaaagagaaggttcaggcgttaatgatgccgttccgctataccgcagacatcagtattgccgatgcgaaggaagaggctgaaatcctgggtatcgaattcgatattctatctatcgaaccgatgtttgatgcttttatgggacaactggcgccgatgtttgccggtactgaaaaagacaccaccgaagaaaatttacaggcgcgctgccgtggcgtggtgctgatggcattatcaaataaacgccgcagcattgtgctgactactggtaataaaagcgaaatggctgtcggttatgccacgctgtacggtgatatggcgggtggctttgacgtgctgaaagacgtacctaaaacgctggtatttaagctgtgcgaatatcgcaataccgtttcttacgtgatcccgcagcgggttatcgatcgtccgccgtccgccgaactggcgccggatcagttagatcaggacagcctgccgccttacgacattctcgatgcgattctggaaggctacgttgaacatgataagtcggtagccgatttggtggctgaaggctttgacgaggctattgtgcgcaaggtcattcgtctggtagatattaacgaatataaacggcgtcagtcggctgttgggccgcgcattaccgctcgtagtttcggcaaggatagacgctatccgatcacatccggctttggccgcaaaaattggtaaaacaggaattcgccatcatgaagaaaattgacgcgattattaaaccgttcaaactggatgacgtccgcgaagctttagctgaagtgggcattaccgggatgacggttaccgaagtgaaaggcttcggtcgccagaaaggccataccgagctgtaccgcggggctgagtatatggtggattttttacctaaggttaaaatcgaaattgtcgttgcggatgatatcgtggatacctgcgtagaagccattatgcaaacggctcaaaccggcaagatcggcgacggtaagatttttgtgtttgatgtcgcgcgcgtggtacgtattcgtaccggtgagcaggatgaagaagctatctaactgatactaaatcgaaaacattaaaatcaggtcgtatcatcgaaaagaaccccatttatggggttctttttttaccactaattgaatgctaatcgacgttgcgagtagcttgctgacgattgtctggcatttatccgctgtgcactgagttttccatcagaccggaacgacgaacaatccaagccaatagaacaggttaagcaagatacccgccagaatcactgcaacgacaggcgctgcaattttcattaccgggcggccaatagcttcattcaggaagtacaacgctgtggtaatagtgaaaccggtatagccagccattttgatagaagcaaaaatagcgccgatcagtaacgcatattccatcaacagattcatagcgttacggatattatccgaagcgttacgcactgaggggaagcggccaagccatttacctatagtgcgcagtaacagcacttctagcgagatcacgactgcacctaccaacgccgccaacagcgggttcggaatcaggtaaccgactacaaagacgaaggtgaaaccggctaccgcatacacgccggtcgcgagcgcagtggtggcaatcagtggcacaaagcccaagccacgcataaattcggccaatgaagcctgatgaaccagtgacagtgactcttccggcgtaatccccggcgcataggctttcgccagcgtataaatcgacacttcgctgccggcaaacagtttcatactggcgacggcggaaatcagcccaccgacgatggccaatagcggcaggttcttgattatcctctgggttcgctcctcaaatacggaatgtcctccaccaccgccgaggtgggttttggcgcgaagatcctgagcaatagctatgccgatgagcaataccatgccgacgaagatttcgatggattcagggaacaagccggtgaaacgagtgataaccaagcgggtcatcagcacgataattgctgaaattacagcagttttccagccaaactggtagaaaatagcgaccagtgggaacagcgcaaaagcagaaataactgggctgctcagttcacccaacgaaccgataaagttgactggcagagaggttaacgctgtgttgaccgcaggcagtgaagtcagcgccagaatgccccaggcggcacccagagcaaatgccagatagctgttgatcgccagcacgccgatgatgtcagtcggcaggaacagtaaccaggagttcagtaaaccggtggagagtgtaaaggaaatcccaaccgaagcgataaagccgacgctgaggccgaaagcgatactgcccgcttctctgcggctcatattaccttctaccaactgcggtaaaatcggacggataccgtcatgaaataccgcgacggagcggtgagaaagcagggcggtcatcccggttagcaaagcaaccacgatgatatgaatgtaatccacggttatccccttagcgcagctgagtgatcagcagcggaatggcgtgttcaatatgctccacggataaaccaaaggcgactttgccttcagcaatgaatttctcgatctgttccggtttggctttgatacccggtttggcaatggtcgcgcttttgttataaccaataatggctattgccatggataatgctgcaccggcaccggtattacatgcgccaatataataatccagctgcccatctttcacttttaccgctgcatccatatcggtcagaataaaagtttcaaagctggcgggcgcagttttatcgatcagttctcgtatcagctcacgttgtaacccgacgatgccgatctttttcatagtcactgtccttgcgtagagaagaatttgtttggattatggcgcagcatcatttccacctgctggtgtgaaatacctgcggccaaaagcattggaataaatgaatcaaccagataactgaaacctgtgccaccgttggcttttaaatgagaacggcgggtaatatccatcgaaagcatgactttatccaggacgccgcgctcagccagataaaccagcatggcgatgcgtcgttcatccgggaaatagctgtttttaccaatggtatcgaactggacgtacacacccttatcgatcatctgcaaaatcaaatccggctgttcttttaaatcgcagtggccgataaccacccgatccagcggcacgccatattgctccagcagcgcgatttgctgcattcccatagtgctaaagctggtatgggtcgaaatagccaaaccggtggcatggtgcgccagtgcggcggcgtgaaacacttttgcctcgttgtccgtgacacagttttcactggtaccaatctcggcgataacgccggctttcaggtcggtgccatcaatgcccacttcgatttcatcgatcatggactgcgccaattgttgcgccgagctgtcacgcaccaattgaggatagaaatgatcggtgtagtaacccgttgaagcgatgatgtttatgccactatctcgcatcagattcaataagaactgcgggttacgccccatgtatttattggtgacctcaacaatattgctaacgcctttgctcaccagctcgcgcatttcctgacatatcggctcgtattgatccaaacgacagtcgatgttgtctttaaaaccagataaatcaatatgcagatgttcgtgagcgtaggtatagccattggggttaatcattgggaaaggctccgggaaaccgatggacgcagttgagtgagaaaagattggccattttgcggcataggcgccgagaaaaacgcgcaggcggtcgcacctacgtcggataaagtaaggcgagtgcccagatcgacggcggaaagaccgagctgataaaccagcagtggcacttgttctcgggtgtgtttgccgtggccgatggttgggtcgttaccgtggtcggcaatgacaaccaggacgtcatcgggttgcattgcggcgattatctgattgagcgcactgtctaccagttgcagccggtcggcgtaacgcagggtgtcttgttgatgaccagccagatcggtttcctgaatgttggtacagataaaactgtctccgggtttgagcaattcgtcgcgcataatatcaagaatggtctgagaatcgacaatccccgcgtaattgattccattagaattacttactatatcggcaaccttaccgatcagtacagtaggaatatgtcgctgccataacatggctggagcctgcacctgttcatcgacaccataacccaaatgcgcgacgcgaaaattgtgtcgatagacaccggaatttggcgcattgataccaatatatttcccttcacgactttccgccgcccgcagcagatcggcggtatccggcaaatcgccgccaaaagcgataacgcgcccgactttaacagtttcacgaaccaattgaccgatggctagcacctgctcgaaggataatcgattgaagtcagcgctgatgttatacacctggcctaaatcggcttccagattatcgccgatcgccgcaccctgattcacccataaatagctcagattgtttaaggttatgcgttcgacctgatagccgttgccggtaagctgggatgcgacgtcatcaatcacggcggagaagggcatagaaagcggtggcagaggtaaagtgcccataatttcctgatggccaataaaggtatcgccaccttcatgttgcaataatattcgaccaaaggcggcggcgggattgggctgcattaaattcggagcgtagcctaatgagttgatcagaccgagtttttccagcgtgggtaaatataattcgggaagggtttcaagaatgtgcccgcaggtattggcaccgatatcctgcggccggacgagcgggacatccggcatttctccaataccaaaactatcaatgaccaataccatgaatttactcatggcaatctccttagttcaggctattcccctgactgtcatagcggccgattaatttcggttctccgcgttggatcccctcgaccaatgcgacgtcgctgcgtgtgacaaatatttgggtgcggaaactcattaccagcgggctgccgatcgggaatttatcgctcaaacgcaggcaataatcgatgctgctgtcatccactggcaataccttactgctgtggtaagcctggttgtgccatatcagtgcattgcttaggtggccacgacgatagtaaccgccgccgaagaagtagctggtatctccgacatgatgagagatttcggatagatacagcagcgagactttttccggctgagagccgtcttggttggctggaatagtaccggttagcgcatggcccggttcggtatgggtaacgcctaactgagccagttcgggcataacctgaatgcaggcggcagaaggcgcgttgacttgttcaacattaacgccctgtttttccagaatctctttagccgccagcagagtaaacatattggtggttggcagggttcgctgttcctgaggattaaacagcatgcaagggaaatgggtcacgccaaccagtcttaccgcaggcatattagcaatagcctgaatgacttccggcagttgattgagttcaaagccgccttcctgaccggcatagagcagatcgcctgcctggttgactttcaacatgattggctgagttttgccttgctttcgagctgcgtcagaaatttgctgcgctttctccagcgagaaaatggtgatgacttcaggttgctggctgacaatttcgtccaccatacccgacggcggctggaccaaatgcccgacgtgagccaccggaattccgtgctgatagagctgcctgacctctttaaaatccactgccaccacgccctgatagccgcatgccaacaggcgtttgcagagttcgggattacgtccgaattgcttactcatcaggtatagcttgatattgcaacgtctggcttcgtccagcaggctccgggcattggatagcgtttgatctacatcgataacgtaagtatccgggcctattttaccctgttgccacagcataatggctgtatcaatcagggttgggttctgttttcttaaggcattcaaaaacatgctgtttcctagacactttcaggcgtcattttattaatttaaattattatttttttgaatatttattatgtaatgaatcagcgttggtgtgttcttcagtgtagctgcttatctcaaaggtggtagattactggcaaggtaaaggctgtacaaattagacagcaagtaaccctgctcattatcatcaggcttaatatcaaagtaggctagcaaatcttgattaatgtctcgaatatattgaatatcttcgctttggattaattcggacaacaaatccgcatccattcccttaatcagttcgccacggcgggttcgcatcagggcgttagccatatgcgtcaccgccatttccccctgaacgttatcaatagatatctgccagaaattagctaatctattgataactttgttcattccgaggaaaacctcttcatcaattaccccagcctgatataaaatactgaggcgcggatccataatatctccggactattaattaataacgtgggtcaactttaccgagttggacatcactttggtgctgtaataattgctctgaattaatgccattctccaataatagttttattgggtgattatctggtctaatcaatatcacggcctgagaggcttgaatatagcgttcgtccccacgtagcttggttgcctgcaaattatcatgggaaacatcgtcagtcaggttccagatcgcagcgtcaatttcgccgcggctaatttgcgcgacgcagtcactgtaaggcacatcgacacgttctatattttgattggcaaacttaatttccgttaacagacattggtccggagagcgcggatccagcccgacgcggcgaatatcatgttcttcgcctcgacggcaaatcagctggtggccgtcaacgtaggaacccgtgcctaaattgagcgcaacggtaaccttaccctgatcaacataattctgtgccgccaaacgcgaaactaccgccatatcgtagatgccgtcgatcaaacactcgactcgcacttctgcaccacgcatatgggcaaaatacagcggcaaaatggtaaattgttcctttaatccgctggctagcccttcgtacagcttggtatagggcagcggcattgcgcagaccatattacccaaatctgcctgttgtagcaggcatgacatattgagatccataagctgcgttccgttgcggccacggcgctctacgacaatagcgccttcttgttccaataccttcaaggcgtgttgtaccacgcctacggaaatcgcgaaattatccgataactcgtcgatggttttcagtcgatttcctgggcgttcgccaattaaatagcgcgccatggataccagagccaacccttctttttttatgaattttctactcatgctgggtgtatttagccttatgttatctaggtgcagatagtgactttaatactattgattacaatgatattaattttcaattatatgaatatttaaacattcatataaataatagatgtttgcaacgataaaagcgagcgggggcgttattgatcacaatataagagcaataattatcttaggaaagtacagattcaatacaataaaaaaccggccaacaatacagactgaccgggaaagaaacgcagaaaaacttatcaattaaataactttgtgaggtccgaagcattcatagtgaatatgttctgccgggacacccatttccagtaattgtttaccaacaaactgcatgaagaccagagggccgcagaagtagtaatgcatatcgggatgaataattaatgactgcaactcagccagattcataaagcctttactatggtaatgctggccagggatatcctgctcttccggctggcgataccaaacgtggcgattcagattcggcatatttttcgctatttcagcgacttcatcggcaaaggcatgaacccggccattttccgccgcatggaaccagtgcacttcggcgctatgttgttgagcgtacagcgtatgcaacatgctcaacattggcgtttggcccacgccggcagaaatcagcgctaccggggtttccggtgaaatatcaaggaagaaatcgccgcgcggtggcgcaatgcgcacgatgtcgccttcctgcgcgatgttatgcaagtagttggataccgtccctttttcttcgcgttttaccgcaatacggtaggatttaccgttaggcgcagcggtcagggaatattggcgaatttgacggttttctaaccggctatcttcgatataaatacccaaatattgacctggtttgaaattcactacgctgccgccgtcctccggcactagcaagaagctgcagataacgtcgctttgcatttcttttttcgcaatgcggaaacgacgcagggttctccagccgccggtattttcttccacttcacgataaatttgctcttcgcgttgaataaacacgtctgccagcacaccgtaagctttggcccaagcatccaacacttcctgacccgggctgaataattcatccagcgtcgcaattaaatgtttgcctacgatttgataatcagacggctgaatattcaagctggtgtgtttttgagcaatacgttcaaccgcaggcagcatagccgaaagattttcaatgttggccgcgtaggcgcagatagcattaaacaaagcttcgcgctgatcgccgctgaactgattgctcatattaaaggtatctttcagctcagggttatgagcaaacatacgatcgtaaaaatgcgcagtgagcttcgaaccggtttcaaccagcaaaggaatggttgattttacggtggcgatggtttggctatccagcatggtgaggctcctataatttttcgaataataatgtgcaaattaatacatgtattttaaatgcatcttataaaaaacaacacggcttgtaaatacacattcattaatgagggcgattatcgttacgcgccagttcacacttatgaaaaaaccgcatactcaacatgaggataaatccgttgatttgtgtgaactcagagcagtgcaaagcctcatgtggcttgaagccaatcgtttgcgtaaaaacctctgtcaagacctatcttaacgaggtgaaaacagtttacactgtgggccagaacccaaacgggtggtccactaggtgtatttagttagctgagtcaggagagccggatgttaaagcgtgaaatgaacattgccgattatgatgcagatctatggcgtgcaatggagcaagaagtggtgcgccaggaagagcacatcgagctgattgcgtctgagaactataccagcccgcgtgttatgcaggcgcagggttcccagttgacgaacaaatatgctgaaggttatccgggcaagcgttactacggtggctgtgagtatgtcgatgtggttgagcaactggctatcgaccgcgcgaaagagctgtttggcgcagattatgccaacgttcagccgcactcaggctcacaggctaacgttgcggtttattccgcgctgctgaagcccggcgataccgtattgggtatgaatctggcccatggcggccacctgactcacggctccccggtaaacttctccggtaaactgtacaacatcgttccttacggcatcgatgaatctggcaagatcgactatgacgacatggcgcgtcaggctgaactgcataaaccaaaaatgatcatcggcggcttctctgcctattccggtatcgttgattgggcaaaaatgcgtgaaatcgctgatagcatcggcgcgtggctgtttgtagatatggctcacgtggcaggtctggttgctgcgggcgtttaccctaacccggttcctcacgcgcacatcgtcaccacgaccactcacaaaactctggctggcccacgcggcggtctgattttggcgaaaggcggcgacgaagaactgtataagaaactgaattcttccgtattccctgcaaatcagggtggcccgttgatgcacgttatcgccggtaaagccgtagcgctgaaagaagcaatggagcctgaattcaaggtttaccagcagcaggttgccaaaaacgcgaaagcgatggtttctgtcttcctggatcgcggctacaaagtggtttctggcggtactgaaaaccaccttttcctgctggatttggtggacaaagatatcaccggtaaagatgcggatgccgctttgggtcgtgccaatatcaccgtgaacaaaaacagcgtgcctaacgatcctaagagcccgtttgtgacttccggcgtgcgtattggttccccggctatcacgcgtcgcggtttcaaagaagcggaatccatcgagctggctggctggatgtgtgatgtgttggataacatcaacgacgaagcgactatcgaacgtactaaacagaaagttctggaaatttgcgcccgtttcccggtttatgcataatttctgcgagtttatatagttgttatcaaacccgcttcggcgggttttttttcatcaaatatccggtaatgaataaagcggaaacgccagataaaagagaatttcttcactcgtgatgtgaggtagcttgcaaactatttgtttggatgattacccggttgctagcgaagaagggctctgtcacagtatctggctgactccggaggaattatggtattgcaatcaacgcgctggctggcgctcagttatttcacctacttcttttcttacggtattttcctgcctttttggagtgtgtggttacaaggcgaaggtattccgccggaaaccatcggtatcttgttaggcgctggtctggtttctcgtttcctcggcagtttaattattgcccctagcgtgaaaaacccctcccatctggttactgcactaagaattctggctttgctgacgctggcatttgccatcggtttttggtttggcagtggctgggcgtggctgatgatagtcattgccggttttaacctgtttttcggcccgctggttcctttgaccgatgcgctggctgcgacctggcaaaaacagatctcaatggattatggcaaggtgcgtctgtggggatcgctggcgtttgtcattggttcagcgttgaccggcaaactggtatctgtttggggacataacgcgattctttacagcctgaccgtcgcggtagcggcgatgctgctgggcgtcttattacgcccaaatgtaatgcctaaaggcgagattcgtagcaatgtattaccggcgaccaagtggaaaattttactgtctgaagggccggtctggcgatttttgctgtgcgtgacgctgctgcaaggcgctcatgcgggttactacagctttagcgcaatttactggaaagaagccggttattcggcggcgactatcggttatctgtggtcgctgggcgtggtggccgagattttggtcttcgctttcagtaatgtgctattccgccgctggacggcgcgcggcctgctgctgctttccgctatcagcgggataattcgctggagtctgatggcatcgactaccgagctgcactggctgttgctgattcagattttgcactgcggctcctttaccgtttgccacctggcagcaatgcgctttatcgccgctcgccgtggcgcggatgttattcgtctgcaatccgtttactctggcttggcgatgggaggagggattgcggtgatgacggtgatttccggcttcctgttcgaacatattcagggcggtgtattctgggtgatggcgctggtggctgtaccggctctatttattcggccagcagtggtagcgaatccagaagacctggcggattaaggcgtttccagccaacgacgaatagcgatctgatctgcttttgttaacggtaaaagcacctgaattaacggcggcgttgactcgggtgtttctcgtttatagggagaaatcactagattggcaccgggcggtgcgccagattttaggtattcagaataagataagtatttgatatagagtggtagtagcgttagctcacgcagttgctgttctactcggtgctccaactccgggttcccgttggtcagtagtaaaatctgtttttcttgtaacgcattgccctgcatcagccatgcaccaaagctaatggcaatcagccctagctcatcggccgaaaattcaatctggtattcccgttcaaaatcgattaaagcttcgcgagtcgtccgtaacaagcggggatatttgctgctgatttcatccagtaaaatattatccacaccaatatgaaagcggcagcgctcgattgccggagccaaatgagcaaatagctggctgattaactcatcgtcactgctgaattccattccggaaatctgttgaaaacgtccaatcaatcgatgaatggaatccatcaggcgaacatcttccggagaatggttgctgctgtagctatgcgctttaatcatggtcaacgtcaggataaacacatccctttcgctgctggctaaggggcgggaaagctgattattcagtgtgcaaaacaggctctcggcggcggtcagttctaccttttggctcaaccacgtcacctgctgctgctctaactgcgggtagttttgttgctgattttcccaaaccgcgtaggccagataaatctgcaaaaaatagcggtcacgttcgtccagcgggcgaggtagaagctgttcacattgttccacgatatcttgtagcggcggtaatacggcattttcactttgccattgcagcgcctgatgtaacgctggcacaaagtttttatcgataaactcgggacaatagcgtagccctcggcgtagccaatgaatcagacacagccgtttatttagtaacgttccttgtagttggcagtcctcagccggattggtacgaatatccaggtgatagaaacgctggatttcgttcgccacctcagctatatcttgccgggtggtcggaagcccgacgccatttaattgactgatagtctccagttttaccggcaatgtcggagtaaacagcagcaataacgcatgacaacggcgctgttgaccggagagctcaggcactggtgtagtgtctaggctcataaaaccttccgaagtaagtttgattggtattatcacgctaagcatagcaaaagtgggaaaaccagcgcgctcgccgcaatagcttttacatcgggttacaacttacatcacaataattgctgtaaatccaagggttgatagatgttcaatgtgttatgttataacaattatgcgtcgtacaaatatatttggggactatttattggcgtggcagttttactgtatagcccctcagggctagcgcatccgcacagttttatcgagatggaaaccacttttgtggtggatgaccagaaactgaccggtatgaaaatggtctggacgatggatgaaattacctccgccgatctactttatgacgcagaaaatgccaaaagtgactcggaaatctggaagaaactggcggcggaagtcatggctaacgtcttggggcagcactatttcaccgatatttaccgcgatggaaagccggtgaaatacctgaatttaccgacggaataccatttgtcccgcaaaggacatcgggcggtattggcattcgtgatgcctttagccgatccgcagccgatggtcggtaagccttttataatttcgacttacgatccaacgtattttgtcgacatgacttacccggatcaggccgcaattcatttaccagatgaatggactaagcgttgtcaggccactttatttaccccaaatccggacgcatcgttacaggcctacgccttgtcgctagataaggaagactcccctggggaagatatggctttaggaaaacaatttgcccaacggataactctacaatgtcagtaagttttaccccggcaacccgccgtcagaaacactggttcgttcatctttggcctttggcattgttcctgttgtgtttggcgctggcggcgcaattggcttggtcgtactggcctgagttgctgtttaaaagcgtggtatggcaaaaaaccatgcaccagcaaatggcgcagctactgcaacaggtaaaagcaaatccgcatcaaacgggattggggctgatgtttttcagcctgatttatggtgtgttgcatgcggttggccccggtcacggaaaagtggtgattgtcacttatctggctacgcatcccgcgcggctgaaaagtagcctgaaactgacttttctagcctcgctattacagggcggagtggcaatagctttggtctcgctgatattaggcgtgttccaattatcctcccgttatttgcatcaaagcagctactggatggaaaagggcagctttttactggttatcctgttgggattgttactgtgtttccgcgcattaaagcggctttatcaccaaatcactctactcaagccgaagaaaatcactatccagcgtctgcaacctttaccggccgatcatgtacatagtgaaaactgcggctgcgggcatcgtcatcttcccagcgatgaggaattgcaggcgggtaacgattggcgaacccgtttggcggtgatactggcgatgggaatgcgaccctgttccggggcgattatggttttgctgtttgccaaagtcatcggggtatatgtttggggaatagcgtcggcgctggcaatggcgctaggaacttcactaaccatttcgctgctggcgctgtttgttcactacgcccgtcagttagcggtacgtttgagtcgggatcgcgcaccggcggcgtggggctccctcgcctgggccactttagcattggccggaggaatcattttactcttcgcgggagtattgctttatctttccagtcagccgtccatgatgggaggcgttcgtccatttggccgctgaatttcaaccataaaaaatgccagtcagcgtcaaccgactggcattgcaattcggactggaggctgaaaattaacgcttcagcgcttcactcaattcatcgttcattgcctgcaacatagatttcactacgcgcggattaccggcaacaatgttaccagagctgaaatggttatggccgccaacgaagtcggtcacgataccacccgcttcacgaaccagcagttcgccaccagcgaaatcccaaggcttcaggccaatttcgaagaaaccgtctacgcggccagcggcaacgtaagccagatccagcgcggcagaacccgtgcgacgaatatcagcacattgggtaaacagcttacctaacacattaatgtaggccggtgcgtgttgtttcactttgaacgggaaaccggtagccagaatagtgccatccagctctttcgcgttagtaccgcgcaggcggtaaccgttcagctgagcgccttgaccgcgagttgcggtgaacagttcattacgcattggatcgtaaaccactgccacttcagtgcggcctttgatgcgtacagcaatggaaacagcgaaatgtgggaaacgtttgatgaagtttgaggtgccatccagtggatcgataacccattgagtttcgtactcttcaccaagtaattcaccacattcttcactgataatggtgtgttttggataagatttacggataacgtcaatgatcagatgttctgcatcacggtcaacgttagtaacaaagtcattactgcctttctggctcgcttcgacagcgtccggggtttcataatttttggcaatcaggttaccggccttacgcgcagcgcgtatggcgatagtcagcatcggatgcatgggtatcttccaactaggatgttaaagaacgagaaacggcgcgtagtatagcaggggatctgataaatgcctacgcttgtgttaagatgttgcgattccccgctaccctcagagtttgtatgttgcacaatattcgcattgttttggttgaaacttctcacaccggaaacatgggctctactgccagagccatgaaaaccatgggattaactaatttgtatttggtcaatccattggtaaaacctgattctcaggccatcgcgctgtctgcgggtgccagcgatgttatcggcaatgccaccatcgttgacacgctagatgaggctctggccggttgcagcctggtcgttggcactagtgctcgctctcgcacgttgccgtggccgatgctagaaccgcgcgaatgcggcgttcgcagcgcacgtgaagccgaacatgcaccagtggcgctggtgtttggccgtgaacgcgtggggctgactaacgatgaactacagaaatgtcattaccacgtggcgatcccggcaaatccagaatacagctcgctgaatctggcgatggccgtgcagattctggcttatgaagttcgagtggcattcctcgatcgtcaggcagaaatcgcacctaagcaggaagaggaagaagcgccttatccactggtagacgacctggagcgtttttaccagcatctggagcaggttttatcccacaccggctttattcgtcaggcacatccggggcagattatgagcaaattacgccgtctgtttacccgcgccagaccggaaacacaagagcttaatatcctacgtggaatgctgacttcgatcgaaaaacaggataaacatcagaaaagtgccaataacgccaaaatggcgaaagataaagaatagtcatatatatcatgttgatatatgactgtttggcacaaatatataaggatgacgaggcataaaatacttgagtgaattactaggttaaatagttgactaaaacactcaagaatggcagacttctagctcgtttcaccaacaggtaattttaagctatgagactgacatccaaaggtcgttatgccgtgaccgccatgcttgacgtggcattacattcccaggacgggccagtacctctggcagatatttctgaacgtcaaggaatctcgttatcttatctggaacaactcttttcacgtctgcgcaagaatggcctggttgccagcgtacgtggtccgggcggcggttacctgctgggtaaagacgctggccagatcgccgtaggcgcggtcattactgccgtagacgaatctgtcgatgcaacccgttgtcagggtaaagaaggctgccagggtggcgatcgttgcctgacccatacgctgtggcgcgatttgagcgagcgtatcagcagcttcctgaacaacattacattggcggaactggttaataatcaagatattttggaagtagcggatcgtcagaacaacgatacgcgtcgtacggccaacggccgaccgcaagagacgattaacgtcaatctgcgcgcataagcagagtctgcgggatcttcagtttttggaagtgatgtacggagcataagagcaatgaccgaatcaaaagtaaaaacgccgatctatctggattattcagccacaacgccagttgatccgcgtgttgctgaaaagatgatgcagtatttgactttggacggtatcttcggcaacccggcctcccgctcccaccgttttgggtggcaggcagaggaagccgttgatatcgcacgtaacgacatcgccgcgctagtcggtgctgacccacgtgaaattgtgttcacttcgggtgcgacagaatcaaacaaccttgctattaaaggtgccgccaacttctatcagaagaaaggcaagcacatcatcacctgtaaaaccgaacataaagctgtgctggatacctgccgtcagttggagcgtgaaggtttcgaagtgacctacctggcaccgcaaagcaacggtattatcgatctcaaacagcttgaagctgcgatgcgtgaggacaccattttggtttccatcatgcatgtgaataatgaaatcggtgtggtgcaggatatagctgctattggtgaaatgtgccgtagccgcgggatcattttccacgtcgatgcgactcaaagcgtaggcaaactgcctatcgatctgagcaaactgaaagtggatctgatgtccttctctgcccataaaatctatggtccgatgggcattggcgcactgtttgttcgccgtaaaccgcgtattcgtattgaagcacagcagcacggcggcggtcacgagcgcggtatgcgttccggcactttgcctgtgcaccaaattgttggcatgggtgaagcttaccgtattgccaaagaagagatggaaagcgaatctaagcgtttatcctcactgcgtaagcgtctgtgggatggcctgaaagatatcgaagaagtttacctgaacggcgatttagagaatggcgcacctaacattcttaacgtcagcttcaactacgttgaaggtgaatcgctgattatggcgctgaaagacttggccgtttcttcaggttcagcctgtacctccgcaagtctggaaccttcttacgtgctacgcgcgctgggcatgagcgatgagctggcacacagttccatccgtttctccctgggccgttttaccactgaagaagagatcgactacaccattgcgctggttcgcaaatccatcggtcgcctgcgtgaactgtctccactgtgggacatgttcaagcagggcgtggatatcaacagcatcgaatggtcacatcactaattccagactttcagattcaggagcactcaaatggcttatagcgaaaaagtaatagatcattacgaaaacccacgtaacgttggttctttcgataacgaagatccaaccgttggtagcggcatggtcggcgcgccggcctgtggtgatgtgatgaaattgcagatcaaagttaacgaagccgggattatcgaagacgcccgctttaaaacttacggctgcggttccgccattgcttccagctcgctggtgaccgaatggatgaaaggcaagtctctcgatcaggctgaagcgatcaaaaacacgcaaatcgctgaagaactggagttaccgccggttaaaatccactgctcaattctggctgaagatgccattaaagcagcgatcgccgactacaaaagcaaacataacgctaagtagttgtaaatcagtataaataacctgtctgtggttagggcaggttctcagaaatgaggttgttgtatgtcgatatctatcagcgacagtgctgcgcaacgtgtcagcgccttcttggaacaccgtggtaaaggtttgggtttgcgcctgggcgtaagaacctccggctgctccggtatggcgtatgtactagaatttgttgacgaaatgaacgatgacgatatcgtttttgaagacaaaggcgtgaaagtgatcatcgacggtaaaagcatggtctatctggacggtaccgaactggatttcgtcaaagaagggctgaacgaaggctttaagttcaacaatccaaacgtttccggtgaatgcggatgcggtgaaagttttaacgtttaatcgttagtttttgccttatatcgtagcgctatactgacgtttgctgatttatctggctctcttccatgccgctgaggcgggaagggagctgcataaacccctcactcagccacacgacaacttccgagcatgctatggattacttcactttattcgggctgccggctcgctatctcgtagacgccagccaactcacttcccgctatcaggaattgcaacgccagttccatccggatcgctttgccagccagccagaacgcgagcgtttgctggctttgcagcaggctgcgacgatcaatgacgcctatcaaaccctcaagcatccgttaaaacgcgcagagtatatgttatctttgcagggttttgatttgagcaatgaacagcacaccctgcgtgataccgcgtttctgatggaacaattggaactgcgggaagagcttgatgccattgaacgtcaggccgatgccgaaagcgcattagcggcttttaacgcgcgtttggcggtaatgacacaaaaacgtagcgagcaaatggtgcaggaactggataaccagcaatggatcaatgcggcggatactgtgcgaaaattacgttttctggacaagttacagcagcaggttgagcagttggaagaacgtctgtttgacgattttgcctaagagtcaggccgcggttagcaggcttgtgccctgaactgttaatctcatgcttatgatagtgaacgaccaaacgtatcttttaaagaatccctgaataggctgaacatgcctaaaaaagcagggcgttggcgtttcgcttgagaaatttttgtcatttatacccaatagattacccgctgtcgttttaccctgcggcagcctgcaagttaaagggtatagattcatgattgatggaagctcaacatggccttattacaaattagtgagcctggtttaaccgcggcgccgcaccaacgtcggctggccgcaggtatcgatttaggtactaccaattccctggttgctacggtgcgcagcggtaaagcgcaaaccctggcggatagtcagaaccgagatttgttaccctccgtggtgcactatcagcgcgaaggcattgatatcggttgggaggcacgtcagcaggcggcgcaggacccagccaataccatcagttccgtcaaacgaatgatgggacgttcgctagcggatattcagcagcgttatcctaatctgccttactccttccagccgagtgaaaacggcctgccgatgatccaaactgcggtggggctggtcaatccggttcaggtctcagccgatatcctcaaggctttgtcgcagcgtgcgcaggaggccttagaaggccagctcgacggtgttgttatcaccgtaccagcctattttgatgatgcgcaacgtcaaggtacgaaagatgcggcgcgtctcgcaggtttacacgttttacgcttgcttaacgaacctaccgcagcggcgattgcctacggtttggattccggtcaggaaggtgtgattgcggtttacgatctgggtggtggaacctttgatatttctattctgcgcctgagtcgtggggtatttgaagtgctggcaaccggcggggattctgcgctgggcggcgatgactttgatcatctgttggctgactggttacgtgagcaggctggaatttcctcccgcgacgatcacggtgtgcagcggcaattgctggatgcggcgattacggcgaaaattgctctgagtgatgctgacgtagcggaagtgagcgtagcaggctggaaaggggaaattacccgtcaacagtttgaagcgctgattgctacgctagttaaacgcacgttaatggcttgccgtcgtactctaaaagacgccggtgtcagcgctcatgaagtgctggaagtggtgatggtcggcggctcaacgcgcgtgcctttggttcgcgagcaggttgggcagttcttcggtcgcacgccgctgacgtccatcgatcccgataaagtagtcgccatcggcgcagctattcaggctgatattctggtgggcaataaaccagacagcgatatgctgctgttggatgttattccgctgtcgctggggttggaaaccatgggcggtttggtggaaaaagtgattccacgtaataccaccattccggttgctcgggcgcaggaattcaccacctttaaagacggccaaagcgcaatgatgattcacgtgctgcaaggtgagcgagagctggtacaggattgtcgttcgctggctcgatttactctgcgtggcttaccgccgctgccggccggcggcgcgcacattcgcgtgacttttcaggttgatgccgatggtttgctaagcgtgacggcgatggaaaaatccaccggcgtagaagcttcaattcaggttaagccgtcctatgggttatctgatgacgaaattgccacgatgatcaaagattccatggcgaacgcgaagcaagacattaatgcgagaaaactggcggaacaacaagtcgatgcatcacgggtgctggaaagtttgcagggcgcactggcggaagatgccgcattgctgagcgaacaggaaagcgcggcgattgcgcaggccgtggaagtcttgcagcaaagcaggcagggcagcgacccggcggcgattgaagccgcaatcaaatcgttagatgcacaaacgcaaaactttgccgcgcgtcggatggatgcctctatccgtcgtgctttggctggccattctgtggatgaggtttaatcatgcctaaaatagtatttcttccgaataaagaccattgtccggatggtgccgtatttgaagcgcgtcaaggtgaaacaattttggacgttgctctgcgtaacggaattgatatcgagcacgcctgtgaaatgtcctgcgcctgtactacctgccattgcgtagtgcgtgagggctttgattccctgaatgaaagcaccgaactggaagacgacatgctggataaagcctggggactggagccggaaagtcgtctgagctgtcaggctcgagtggctgatgaagatctggtggttgaaattcctcgctacaccgtcaaccacgctcgcgagcactaatggatattattcgtcgatccgctttgggcggcggcggataaaggagaaacgaatgagtttaacatggcaagacacgcgggaaatcggtgaagcgctgtacgatcagtttcccgatctcgatcccaaaacggtgcgttttaccgatatgcatcagtggatttgcgatctggaagagtttgatgacgatccggcgcgatcaaatgaaaaagtgctggaagcgatcttactagtctggttagatgagttcgagtaaatatctctggggtcgcgttggcggccccgtttctttttgataaaactgtttcctataaaaattttctataaatcttttcgtatcaatcgctttgtattcgaggctggtttcgcagaccagtaactaagtagctgaaatacagcaataaaagaataacgacgaggaaagctatgactacagaaattatgcaagtatccctatcaaccaatccggcagatgcccgctggggcgagaaagccctgttaagtaccaacgatcaaggtatgactattcacctaacgggcaaagatgctctgggtgtgattcagcgtgcagcgcgtaaaatcgacggacaaggtattaaaaaagtgaagctggccggtgaaggctggggtttggaacaaagctgggcgttttggcagggtttccgtgggccaaaaggtgagcgcagcgttgaatgggcagaattgccagagaacgatcgtcaggagctggaacagcgtctgaaaattattgattgggtacgtcacaccatcaatacccctgcggaagatctagggccgaaacagctggctaaaaacgccatcgatctgatgtgcagcgtagcctgtgatgctgtcagctaccgcattaccgaaggcgacgatttacgagagcaaaactatgctggtattcataccgtaggccgtggttccgatcgttctccggtactgctggcgttggattttaacccaaccggtaaccctgatgcgccggttatggcttgtctggtcggtaaagggattactttcgattccggcggttatagcctaaaacaaagcgcctttatggattcgatgaagtccgatatgggcggcgcagcgactctgaccggcgctctggcattagcggcagctcgcggtttgaaccagcgtgtaaaactgtatctgtgctgtgcggataacatggtgagcggcaatgcctttaagctgggcgatattattcgctaccgtaatggcaaaaccgttgaaatcatgaataccgatgccgaagggcgtttggtattggccgatggtctgatcgatgcatcggagcaaaatgcgtcgctgattatcgatgcagcgactctgaccggcgcggcgaaaaccgctctgggtaatgattatcacgctttgttcagcttcgatgatgaattggcgcaggaactgctggaaagtgcgaaaagtgaaaatgaaccgttctggcgcttaccgctggccgaattccatcgcaaccagctgccgtccaactttgccgaattgaacaacgttgccgcgccgtcttatccggccggtgctagcacggcggcgggcttcctgtcccacttcgtgaaaaattatcagcaaggctggcttcacatcgattgctccgccacttatcgtaaaggtgcagtggatcaatggtccgctggcgcaaccggtctgggtgtgcgcaccgtagctaacctgctgctggcgaaagccaaatcataggtcgcagctgaagcagttttaccaagtctgtttgaataatctggggcgcctgctggtgcccctttatcgatctgcatgattcctaattgattgctgttttggagtatgaaatgagttttccgcatcttccctcatctgatcatgactatagccatgaccatgaagaaaataccggtgaaaatgagctggagaagctattaaaactggcggcaagtgagtctattcaccgaccggcctttttccgtgccttactcgatgccaccgttttggtattgggcgattccgggcaggaaagtcaggacggtgaaatgactttctccgccggtaatggggtgaatattctgcattgggaaaaacagggcggcgaattgaccattccttttttttcttcgctggaaactttgcagcaagcgatcagtcaatctgaaggcgaaaaagagcagccttttgtggcgatgccggtacgcgtgctgtttgaaatgacgcagggagccagcctgtttttgaacccgaaaactgaatatggcaaagaattctatccggaagaagtggctatgctattggccaacggtggtgtagctaaaccaacggaaatggtggtggataaagaaacgcagattctgcttggacaaccagaagaatatccgtcggtgattgttgatgcgttaaccaaactattcagccagcgcaagccggtgcgccgagcatttctggcgttaatgcatgataaaagcgtggatgagaaaccgaatttgctgatcgggctggaagtggatggttcagaagaagaaattgaaattctgattcaggaagccggtcatattgccagcgagcacgcgccagacgatagcccggttgatttttgcgtggtatcggaaaaagaacgaggcgttagccattatttgactacgcatacgcagcctttctaccaacggaaatggggcagttggctgcgaaatagcattccttcatcagggcaggcgtaatttatactggacggaagccgctgagtttccgtcctattcttcgtatttatcattacttcgaaacgatttcttcaacttttccttcactctttgtcctcaagtgactaaatcccgtaaacatccctttccttttttaactttaataagataatagcgcctatgtgcgatggcttattcgctctctcagccagggaaaaacagaatgaatccataccctaagaaggtatttcagtcaggcaagaaaatttgtcagggaatgatgttggccggcgcggtattactgatggcggcctgtgatgagggcgataaaacatccgccgtcgccaatgccaaacagactaacgcggctgccgttgtacccgctgccgccaaaaaaaccgatgccgcctcgctggcggaaatggccaagcgttttgccggtaagcctttgacactgcttgatgcttcagagcttcagctagacggtgccagcggaatggtattgaccttctccgttcctctcgatcccaatcaggattttggtgcgcaggtgcatttggtcgatacccaaagcgggaaaatcgacggtgcctgggagctgtcagacaatctgaccgagttgcgtttacggcatttactgccggaacgtaaactgctgctaacgctggacgctggcctaaaaggcattagcggccaaacgttaaccgtaccggaaccgcaaaaaatcaccactcgtagcattaaaccgagcgtaggttttgccagcaaaggttcgcttttgccaaccaaattggcgcagggcttaccggtaatggcgctgaatgtcgatcacgttgacgttaactttttccgcatcaaaccggccaatctggctaatttcatcgcgacctggcagtaccgaaattcattcggtacctgggaatctgatgaactgctgaaaatggccgatctggtgtataccggccgtttcgatcttaatccacagcgtaatacgcgagaaaaaatcctgctgccgctaggagatatcaagccgttgcaggaaaccggcgtttatctggcggtgatgcaacaggcgggacagtacagctatagcatcgcggccagcatgtttacgctaagcgacattggcgtttcggtacatagctatcgcgatcgtctggacgtcttcgctcaagggttagaggggggggccgcgctgaaagacgttgccctacagctattggatgaaaaagggcaggtgctggcagaagggaaaaccgatgctcagggccacgcccagttagaaaaaaatgccaaagggaaactgctactggcgagcaaagatgggcaaaccagcctgatcgatttggtggctccggcgctggatctggccgaatttgaaatcgctgggccggaaggttatcaaaaacaattctttgcctttggtccgcgcgatctttaccgaccgggtgaaaccttgattgttaacggtttactgcgggatgccgacgggaagcctctcgccgctcagccagttaaagtcgacatcgtcaagccggataatcaggtggcccgcagctttgtctggcagccacaggacggcttataccaataccaatatgcgattccggatagtgcgctgaccggggattgggcgctgcgctttgatttgggcgacaaccagccgcgtttatataaattcaaagtggaagatttcctgccggaacgcatggcgctggatatttccaccagtaaacagccgttgagcaccgatgccgcgttggcctttgacgtgaccggccgttatctgtacggcgcaccggcggcggataaccgtttgcaaggacaggcatttttgcgtccgcagcgagaggcgctaaccgcactgcccggctttgaatttggttcagtggcggaagagaatctttcccgaactttggatgaatttgataccgcattggataaaaacggcgaactggccgtgcaaatcgataacagttggagcggcgttaaatctccggtgaaagtgattttacaggcgagtttgctggaatccggcggtcgtccggtaacccgtcgcgctgagcaggctatttggcctgcaaaagaattggcggggattcgtccattattcagcaagcgaaacgtttatgactatgtttccgataaatatcgttcgcaagcgatggtggatgtcgatagtcaggccgagtttgaggtggtttatgccaacgcagccggagagaaactggcggcaaaaggcctgaaagttcgtttgatccgtgaacgccgtgattactactggcagtggtcggaaagcgacggctggatgtcgcaatacgataaaaaagacctgatgctggacgaaaaaaatcttgatatcgccgcaggcagcagcggcaaagtcagcttcccggtggagtggggggcttatcgggttgaagtgagcaatagccacaacgatttggtgagtagcactcgtttctgggccggttacgattggcaggacaataccggtggcagcggctcggtgcgtccggatcaggtaaaactgaagctggataaaccggcttatcgtccgggtgaaaaagtgaaattacatgtggaagcgccagcggccggtaccggttatttgctggtggagtccagcgacggcccactgtggtggcaggaagttgcggtgccagtcggcggtgctgacgttgaggtgccattgaataaggattggaaccgacatgatttgtatctgagcgccacggttattcgtccgggtgataaaacggtgcaatccacgcctaaacgtgcggtaggtattctgcatctgcctttggcagatgaagggcgcaagctaggtctgacgctggatgcaccggcgcggatgcgtccgaatgagacactgacggtcaaagtcaaagctaacccaatagacggtaagctgccgaagaaagtgcaggtgctgttgtccgccgtggatagcggaattctcagcattactgattttgcgacgccagatccttacgatgctttctttgggcgtaaacgttatagcgtcgatcaatatgatgtatacggccaattgattgaaggtcaggggcgtttgggtagcctgcgttttggtggggacggcgatgaggaagacgctctgtctcgcggcggtaaaaaaccgataaccgaagtgaccattgtggctcagcaggcgcagccggtgacgctgaatgaacaaggtgaaggctctattcagttagctattccggatttcaacggcgaattgcgtttgatggctcaggcatggagcgatgaagattttggtaaagccgaaagtaaagtgatcgttgccgcaccgctgatcgcgcagttagccgcgccgcgcttcctggcgggtggagaccataccgaactggcgctggacttaagcaacctgtccggtcatccacaaaatttacaggtgaaactcagcgccactggtctgatcgcgttaaacggcgcaggggaacagcagctttctctggccaacggcgaacgtaaaactctgctgattccggtgcaggctctgaacggtttcggtcagggggatattggtttggttatcagcggcgttgccctgccaaatgaaaatctaccggattatcaacatcactggaaaattggcgtgcgaccggcttatccggcacagactcgccatttcgccaatattctgcacagcggcgaaagctggatactaccgccagaggccactgaaggtctggaacaagatacccttgaaggccagttgttgttaaccagccgaccgccgttaaacgtggcgcgctacatcagcgagctgtatgcctacccttatggctgtctggagcaaaccgttagcggcctgtatccgtcgctgtacagcaattatgcccagttaacttccattggcattaaagccgatagcgatgaaaaacgccgtaaatccatcgataccggcatcgaacatctgctgagtatgcaaaaggataacggtggatttgcgctgtgggacaaacagggttgggaagaacattggctgacggcctatgccaccgatttcctgttccgagctagccagcagggttacagcgtgccagccagcgcgctgacggcggccaataatcgtttactgcgttatttgcaggatccaagccaaattgagatgcgctacagctccaatgatctgcattcacgctttgcggtacaagcttacgctgggctggttttagcttcgcagcagaaagcgcctctgggtgcgctacgtcagttggccaaccgcagtaaagacgcccgcaccggcttaccattggtgcaattgggtatcgcgctgaaaatgatgggtgatatgcctcgagccgaagtcctgctgacgcaggggatgacgacgacacgcgctaaaaccgattattggttgggagattacggcagtgaaattcgtgacaatgctttgattctctcattgttaacggaaaacaacctattgccgcagcagcgtgatagccggttgctgtcgttgtctgagcaactcactggaaagcgttatttatcgacgcaggaaagcaacgcggtatatctggccggacgcactttaattagcgccaatgaaacgccgtggcagatcgctttcgcgacaaatcacgcggaaggggcggcagaaactcatgacaaaccgcttagccagaattggtctgctaagcagctgaccgaaggtttggcgctacagaatccggggagcgcggcagtttatagccgattagatttagtaggttatccgcagatggcaccaacgccttctaacaataatctaagtatcacacgtacttatctggatatgaacggtcatccggtggaattggatcaggttaaaagcggccagttaatcgtggtttacctgagagtgggcgctaaccaacgggtgcctgatgcgctggtggtcgatttactgcctgccgggttggaactggaaaaccagaatctgggtgacagcagcgccagcttgggggaaagcgccagcgggttgccggagctacagatgaatatgcagcaggcgaccattaaacatcaggaattccgtgacgatcgctatgttgcagccgttgatgtcgatggctacaacttcaccacgctgctgtatctggccagagcggtcacaccgggtacctacctgattccaccgccgcaggtggaatccatgtacgtaccggaatggcgtgctgtgggttcaacgccaacgcagctacgcgtactgaaataaactttctggcctctttgttgcggattatctgtgcaaaggggccgaaatcatcgcctgatgactcgttttttccgctctcgccgccgtttctggcttgctttgctgtttatctcgctgctgctgccggcggctatctggctggctgatagagcctggccgctgcctctaactgatgtacaaatggcacggattgtggtggcggaagatggctctcccctatggcgttttgcagatgatgacggcgtctggcgctatccggtcagtatcaaacaggtttctccgtattatttgcaagcgttgctaacctatgaagatcgctggttctatcatcatcccggtgttaatccattatctctggcgcgtgcggcctggcaggatctccgtgcggggaaaatactctccggcggcagtacgctttccatgcaggttgcgcgcctgatcgatccacatcctcgcactttaggtggaaaactgcgtcaggtctggcgcacctttcagttggaatggcatctgtccaaagaccagattttggagatttacctgaaccgcgcgccttttggcgggacattgcagggcatcggtgccgccagttggacttatttaggcaaagcgccggacaacttgacccaaggggaagcggctttgctggcggtactgccgcaggcaccgagccatttgcggcccgatcgttaccctttacgtgccaaagcggcgcgagacaaagtattaacccgattggcgcagtacggcgtctggcctacgagtcaggtgactgaaattcaacaggaagatatctggctggctcctcgtcaggtgccgcaactggcacctctgctggctcgccgtctgactctcggtaaccagcgcgaacttattcaaacaacgctggacgccggtttgcagcgccaactggaagatatggccgccggctggcggcaccagttgccggagaaaacctctctcggtgtgctagtagtagaccacacaaccatggaagtgaaggcttacatcgcctcggttgatttcggtgatgacagtcgtttcggccatgttgataccatcagcgcgtggcgttcacctggctcgacgctcaagccctttttatatgcgatggcattagatgatggcctcattcacggcgaatccttgttacaggacgttccgcgtcggtttggcaattatcgtccggggaattttgataccggttttcacgggcctgtgagtgctagcgatgcattagtacgttcgctgaatctgcccgcggtacaactcttggaggcttatggctccaaacgttttgccgccaatttgcgcaatgccggcctgatattacgttttcctctgcacagcgaacctaatctggcgctgatattaggcggaaccggcgcacgtttagatcaattggttaccgcttttagcgcctttgggcgtggagggatggccggacagctacgtttcgagccgaagcaaccgttgcttcagcggcggctattttcccccggcgcggcgtggattgtacgacggattatggcgggagaagggaggccggtgcccgacgatattttacctgcggttgtgcctttggcatggaaaaccggcaccagttatggttatcgggacgcatgggcgattggcctgaacgcccgctatacgctgggcatttgggttggcaggcccgacggcacgccggttgcagggcaatttggctatgctactgcggtacctattttgcatcaggttaatggcgtgctcatggcgcgcttgaatcagggaaatcgagcattaccgatcgacccgcggcctgaatcagtgagtcgggaagagatctgctggccgggcggccagccattgccagccggtgacagtaactgccgtcagcgacgccagagttgggtactggatggtactttgccgcccacactggcggctcccggacaggaaaatatccaaggtagccagatgaatatatggctgaataagcaaggtcagcgagtggcggcagattgcccggacgctacgccgacccgtttaactctctggccgttgccgcttgagccttggctgccgtgggcagagcgtcgtgcgcagcgtttgccaccggtaaatgccacctgcccgccgctagcggaaaatgacagtcctccacttttgattctgggtattcgggatggggctgttgtgcgtcgtttaccgggtaagaacagtctggatttacgattggaagcgcagggcgggcaaggggaacgctggtggttcttgaacggcgagcaggttgctaccactcaaaatcatcaatcatggctacaaacgctgacggctccggggcgttatcagctaaatgtgttggatgaaagcgggcaagtcagcaacgttgaattccgactggagtaagaaagtccaaattatcttaattaaaaaacgcaatgcatatggaaatacgatgtatttgttgtttttatattaaaaaatagtgtaaccaataaaatgttgattttatataatcccaattgattttttttattatttttaacctcggctattgatgattttctttcaaagtgaatttttttatttttatttttatttttatttttctttatcaacaatcaacaatcaacaatcaacaatcaatagcaatattggagttttgatgatgaatataaaaatattatcaattataatttttatcacaatattttcctgttttgacgtattgtccaatgagccaaaagtctgtttctttatgaatgatagttatcgaggcgagtctctctgtgctggaaaaaataactcggtggaaagtattcctgaaagatggaatgaccgtatatcatcggtagttattcctcagggattgtctgttaatgtttataaagatattaatttctcaggcgaaaaattagttattaaacaaaatactgactttgttaaagacgaaactaaaataggttttaacgatgagattagctcatttgaagtaaatagtacggcatgtttttatgaaagtgatgagttttctggaagtgcagtatgtctggcggcaaatgaaagtatcgatctttatagcaataactatcatagcaggaaaaactaccacattcttaatccacttaacgatcagataagttctattactgttccccaaaatatgcaggcggttgtttatgaagacgatggttttcaaggggaatattatgttttgacggaagactttacatatcaggatttagaaaaattaaatattaataatagaataaccagtatgcgggtttttcaaaacaatacctttacttgcgatcagcgctgtgtaatcaaagacgttatgcgcattcccttagggaaggcttttggtcattattggttggatgaacgtttgagttctaaagaagtattgataagttttataataaataatgatgatgactattctatttcattcgttgacggtggtgttcttcgagtaaaggatagagaactgtattttatgcatcataataaatacagcagttttatttttcgggttaatgatgatagcgatagattgtcatttctctccagattcaatggtgactattttgaaatacagtttgttgagtcgaaaggaacgagaagtgcttatgtttccccgttgtttagttcactctttaattctggaaaagaaaccgttgattttaaggttagtaatttcaaccttgaaacacccgttgtcattgacaaactggtattaacaggagagcagggaagcaaccgacaaacccgtagcgtgatgggattattatcttgctggtcggtgccgatgctcagtatttataattatgtgattcagggaagctgtaatcagactgacagatttgtcagcaatgccaatgagttctttaaaaaaccgaacgataagatattgcaaatatcgggttcggcaaaacctttacctaaactgaaatcgaatgaaacctttcagacggagcctcaaatcataaatttgcagtctgaacccaaaggtattctcactcaagttcattccgatatgaacggtaaggccttaacggttcctgcgacggcgctggcttgcaaagtttcaatgaaagatcagttacttcctcaactacgctctcgccgtgatttgtctcctgtatgtattgaatggaccttgaatattctcaccgattttactttactgtttggtggcagcacggataactggaatgcggagaattttggacaagttattgaccgaattatacgaaatggtgataccgggcatgccgtatctgatattgaaactgaaactcgtctgattaacacagtccagacgttattcagggaaagtgctcaatcttctggaagccaggacatttttaatctgaaaacggcttttgagttttctcagcttagctatgcggcctatctgtttcatgggaatagtgaagatgaagatagagtgcgaactcctcaggcagtgcaatcactacctcttggacgatatgagctgtcgctgcaagattttcattttgtcgaaaccattcccagaattcggcatggggaacgctgggtagaacatcccgaacagcatttcgatattgaagtgataagtggtacgactgaagcgacggaggctgccagacagcgacttatcccgattattgatgaatggaggcagatttatcatcaagtaaaactgcctgccagagttgacctgccaacggaaattggtgagcctcttgaacaagtcaatcacatggagctgctgcatgaagcatcgcgcttggtgagcgatgtgacacaaagctggttaagaaccagtcgtgatgactacatctatgtgattgtgcgtttgtctggacagatcgtcagtattaccatggcggtagatatcaatgaatttgacgtcgggatcgccggttctctgacaaatccgacctacgtattgcatccgcaggctgagggggcaataagaggagccggcaccgctgcaatcagagcgttggccgattatttgagcgaaaaagggaagcgcacattggtttccagcgtgatcagccagccttcggccatagtgaagaaaaaagttggctttaggtttattgaggaactttgacaatttttggcaagataggaatgatagatctgagcgggtcggtaacaggttaataccctgagctttttatccgcttacttgatttttatgtgaaatgtgatttgtgcacaaaaatgaggaattaagataacagttttttaataaattgttgtcattcccataggcaagcgctttcggcacacatataatctgcgaccacttaacagggtcggcgcaaaaattacttgaaagaatctgcctgtaagccaagcggcaacgctaattcagggtggtttccaagtccggtcaatattagaaatcaaatagaggttgtcatgactgtagaacgtactttttccatcatcaaaccaaacgcagtagctaacaacgacatcggtgctatctacgcgcgttttgaaaatgccggcttcaaaattattgctgcaaaaatgctgcacctgaccaaagaacaggctgaaggcttctacgcagaacataaaggccgtcctttcttcgacggtttggttgagttcatgacctctggcccaatcatggttcaggttctggaaggcgaaaatgcggttcagcgcaaccgtgacatcatgggtgcaaccaacccggataacgcgctggcaggtactctgcgcgctgattttgccgatagctttactgctaacgctgttcacggttctgacgccgttgagtctgcacaacgtgaaatcgcttatttcttcggcgaaaacgaaatttttccacgcagctaataggttgatttaagggaggtcagggcaattttcatcggctgacacaataaaaatgcggccatgccctttcaaccgtagaatccatgccttaaaattcgtacaatgccgcgccccggatgagccagctctaccggggcatttttattatttatccatcgccgtttctttaagtgccacccggtttaaagcacagcgccgcaaagtgtaacaacgaggccacgacaactcatgtctgaacaacagttatctgcaacaattcaacccgatgcttctcctgctgccgacagcgcagtgcaggtagcagcgccggccaccgccaaaatcaacctgctcgatttgaatcgtcagcaaatgcgcgagtttttcgctgaaatgggtgaaaaaccattccgggcagatcaggtcatgaagtggatgtatcactattgctacgatgatttcgagcaaatgaccgacattaataaagtgctgagagcaaaattacagcgcgtggctgaaattcgggcgccggaagtggcagaagaacaacgctcagcggatggcaccattaagtgggcgatcaaagttggcgaccagcaggttgaaaccgtgtatatccctgaagccgatcgcgccactttatgcgtgtcttctcaggttggttgtgctctggaatgtaaattctgctcaaccgctcagcagggtttcaaccgtaaccttcgtgtttccgaaattatcggtcaggtatggcgtgcggccaaaattatcggttcgctgaaatcaaccggcactcgcccgatcaccaacgtcgttatgatgggaatgggcgagccgttgctgaacctgaataacgtggttccggcgatggacatcatgatggatgacttcggttttggtttgtctaaacgtcgcgtaaccctgtctacttcaggtgttgttccggcgctggataaattgggcgatatgattgatgtggcgctggccatttctctgcatgcgccaaccgatgatattcgtgatgaaatcgtaccaatcaatcgtaaatataatatcgaaactttcctcgcggcggttcgtcgctatttagcgaaatcgaacgccaacggcgggcgggtaacggttgagtacgttatgctggatcacattaatgacagcaccgaacaggctcatcagttggcagagtgtttgaaggacacgccgtgtaagattaacctgattccatggaaccccttcccaggcgcgccttatggccgtagctccaatagccgggtagatcgtttctccaaggtattgatggaatacggatttacgactattgttcgtaaaacccgcggcgatgacattgatgcagcctgcggccaattggcgggcgaggtgattgaccgtaccaagcgcacgctgaaaaagaaaatggccggggaacctatagcggttaagacagtctgaaccttacggggcgtttagctccgtttaactgactgttatttaagttttaatctgcaagatgtcaggtgttacgcgtaggtaatacagcaaatatgagggcctgatgcgtcgtcaattattcaggttcttgccattacgcaactggacaattggaagagcatgaagctgaatatactgtggggagcatgtttggcggccgtggttttggccggatgttcggggtcatctccgaataaggttgaccagccggcggcaggtcaaacgcgtttacagcttggtttagcctatctggcgcagggagatttacccgctgcccgtcagaatctggaaaaagccgtgaatgccgctccgcaggattatcaagctcagttgggcatggctttatacgaacagcgcgtcggtgaaaacagcgccgcagaacagcgttatcagcaagcgatgcagctcgctccaggaaatggcaccgtactgaataattacggtgcgtttctgtgtggtttagggcagtatgtatcggctcaacagcagtttagcgctgcggctttgttacctgattacggtcaagttgcagatagtctggaaaatgcaggttattgttttttgcgggctaatcaaaatgaccaggccaaagtgttgctccgccgagcgttgaagtatgatcctgataaaggtgggtcgctgcttgcagaggccgaaaggcaatttggagaagggaaacgcgctcaggcgcaactactactggatgtttatcaacatgttcttccggccagtgccgaaagtttatggttacaaattcgtttcgccgcgctggcaggtcgccaggatagcgttcaacgctatggcaagcagcttgcgcgaagttttccacaatccaaacagtaccagcactttctagctaatgaatactgaagcctcccaagatcaaactgttccagagacgacaggtgtgcgcctgcgtcaagcccgtgaagcattagggctaacccaacagaatgttgccgaacgtctgtgcctgaaagtatcgactattcgggatattgaggaagataacgctcaggcgaatcttgcttcgacgtttttgcgtggttacattcgctcatacgccaaactggttcgtctgcctgaagatgagctattgcctatgctggcaaaacaggcaccgattagagcggcgaaagtcgccccgatgcagagtttttcattgggtaaaaagcgcaagaaacgtgatggctggttgatgatgttcacctggctcattgtttttgttgtgattggtctgaccggtacctggtggtggcaaaatcatcaggcccaacaggcagagatcgccaatatggccgatcagtcttctgcccagttatcgcaaaatgaggggcaaacagtccctctggctgatcaaaacgataacgcggaaaaaaccgaagttccgttgtctgacgctaatgcgtcagctgcgccttcggcaccggaaaccgctccggtaacagctccagccgcggcagggaatgccccggtagccacaggtgaaacgccggcctcgtcagcggtagtttcgccaagtcaggcgactttgcctgaagtgtcaaaccctgccattcctttgccgacggcagaggctgcagttaacgctgccgctgcccaatcggccgggttggtgatgaatttctctgacgattgctggctgcaggttgttgatgcaacgggtaaatcattgttcagcggtattcagaagaagggcgcgaccctgaatttatctggcaaagcaccctataaactgacgataggtgcgccaggggcggtcaccattttgtatcaaggtaaccctgttgatttaagcaagtttgttaaatcaagccgtgttgcccgtttgaccgtcggcgctgagtgatcttgtggttataagtgactacatgactgcaaaggagagcgtgtaatgcataatgaatccccaatcattcgacgtaaatccacgcgtatttacgttggaaaggtgccgattggtgatggagcgccgattgctgtgcaatcgatgaccaacactcgcaccacagacgttgacgcgactgttaaacaaattcaggcattagagcgtgttggcgttgacatcgtccgtgtttcggttccgacgatggatgcggctgaagctttcaagttgattaagcagcgcgccaatgttccattggtcgccgatatccattttgactaccgtattgcgctgaaagtagcggaatacggcgtggattgcctgcgtatcaaccctggcaatattggtaacgaatcacgtatccgtgaagtggttgcctgtgcgcgcgacaagaacatccctatccgtatcggtattaacggcggctcgttggaaaaggacattcaggaaaagtatggcgaacccacgccagaagccctgcttgaatccgcaatgcgtcacgttgatatcctcgatcgcctcaacttcgaccagtttaaagtcagcgtgaaagcctctgatgttttcctggcggtaaactcataccgtttattggcaaaacaaatcaataatccgctgcatctggggattactgaagccggcggcgcgcgtagcggttcagttaaatcggctattggcctcggtttgctgctatctgaaggcatcggtgacacgctgcgtatttctctggccgccgatccggtggaagaagttaaagttggctttgatattctgaagtctctgcgcatccgttcccgtggtatcaatttcatcgcttgcccaacttgctcacgtcaggaatttgacgtgatcggtacggtaaatgcgctggaagaacggctggaagatctgattacgccaatggatgtctctatcattggttgtgtggtgaacggcccgggagaggctttggtttcaactatcggcgtgaccggcgcgcataataaaagcggcttctacgaagacggcgtacgccagcgggaacgttttgacaacaagttgatgatcgaccagttggaagccaaaattcgcgccaaagcagcgatgcttgatgagaaaaaccggattgatatcaaccagctggaagatcaggcgccggtctgatccggcggttgtgtccagcgttgagtaagcgggcttggcccgctttatattgtgcccatagtggtgatgagcgtccccattgaatcacgggacggctagcccctataatcggctttatttttgcatcaaaactatagagaaaagacgtggcaaagaacattcaagccatccgtggtatgaacgactacctgccggctgatacagctttatggcagcgtattgaaggcacattgaaacaagtgctgggcggctacggttacagtgaaattcgcttaccgattgtagagcagaccccgttatttaaacgcgccatcggtgaagtgaccgacgtcgtggaaaaagaaatgtacacctttgacgatcgcaatggcgaaagtctgacgctgcgcccggaaggcacggcgggttgtgtacgcgccgggatcgaacatggtctgctgtacaatcaggaacaacgtttgtggtacatcggcccgatgttccgctacgagcgcccacaaaaaggccgctatcgccaattctatcagttgggtgccgaagtctttggtctgcaagggccggatatcgatgccgaattgattttgctaaccgcacgttggtggaaagcgctgggtatctccgagcacgttcgtcttgagcttaactctattggttcattggacgcacgtgccgattaccgcgaagctttggtcgccttcctggaacagcatcaggaagtgttggatgaagactgcaaacgccggatgtatagcaatccgctgcgtgttttggactcaaaaaatccagaagtccagcagttgctgaacgatgcgccgcgtctttctgaatatctggatgaagaatccaaacagcattttgccggattgtgtgaacttttggatcatgccggtatcccatatagcgttaacgagcgtttggttcgcggcctggattattacaaccgtaccgttttcgaatggataaccaatagccttggttctcaagggacagtctgtgccggcggccgttacgatggtctggtagagcaactgggtggccgagcgacgccagccgtcggttttgctatggggctggagcgtttggttttgctggttcaggcggttaatcctgaattttgcgtaccgccaacggttgatgtgtatttggtgtcttccggtcaggggacacagagcgcagcaatgcagctggctgaaactctgcgtgacgctttgccgtcattgaagctgatgaccaactatggcggcggcaactttaaaaaacaattcgcccgtgccgataaatggggcgcgcgcgtggccttggtgttaggtgaagacgaagtgtctgcacagcaggtagtagtgaaagatctgcgcaagggtgaacaagaaacgctggcgcaagctgatgtagctgcgcgtctggcttcgatgttaggttaaggagagagacaccgtggaagtctataccactgaaaatgaccaggttgacgcagtgcgccgtttctttagtgaaaacggaaaagcgctggccgtgggtgtggtgctcggaattggtgctttggtgggctggcgttattggcagagccatcagaataccgcgctgacggaagcatcttcttccttccagaaagccagtgcggcattggcagccaacaacgctgaaggcgttaccgctgcggaaaaatttgtacaaagcaacagcaacaactatggcgtgttggccgggttggaactggcgcatcactttgtggcacaagggcaatttgataaggctgctcagcagttgagtctggctcagggcaataccaaagatgaaaacctgctgtcgttgatcaacctgcgtttggcgcgtgtccagctgcaattgaaaaagccggaagatgcattgaaaaccctcgatgcggtgaaaggcgatggttggactgcaatggcgcaagacgtgcgtggcgatgcattattaagtaagggcgacgttgctggtgcacgcgcagcttacaccaaaggcgtcgaatctaatgcttctcaggcgttgcaggcattgctgcgcatgaaattgaacaatttgtccagctaaggggaattcccatgcaactgcgtaaaacactcttagtaggactggtttccgtcgccctattgagcggctgctcactgtttaacagtgaagaagatgtggtgaccatgtcgccactgccaacggttgaaaatcagttcactccgaccaaggtgtggagcacttctgttggcagcggtgtgggtgattactactcccatctgcgcccgacctggcagggttcttctgttttcgccgctgatcgtaaaggtctggtgaaagcgatggatatcgatactggtaaacaaatctggcaaaccgatctgtctgaaaaaaccaatttctactccagcaacagatcagccatgctttccggcggtctgactgtttctggttctcacgtgtttgtgggtagcgaaaaagcggtggtctacgcgctgaatgccgacgatggtaaagtagcgtggcagaccagcgtggctggcgaagcgatgtcgcgtccggttgtcagcgacggcgtggttctgattcacactaccaacggtatgttgcaggcgttgaatgagagcgatggcgcgattaaatggacgctgaatctggatgtgccttctctgtccctgcgcggtgaatctgcaccgaccgttgcctttggcgcggctattgttggcggtgataatggtcgcgttagtgcggtcatgatggaacaaggccagctgatttggcagcaacgtatttctcaggtaaccggtactaccgaaattgaccgtctgaacgatgttgatatgacgccaatcgtggtagacggcgtggtttatgcgctggcttacaatggtaacctgaccgcattggatctgcgttctggtcagattctgtggaaacgcgagttgggttcggtcaacgatttcatcgttgattctggtcgcattttcctggttgaccaaaatgaccgcattgtggcactgaaatccgacggtggtattaccctttggagccaaagcgatctattgcatcgtaacttgactgccccagttatgtataatggctatctggtggttggtgatgccgaaggttatctgcactgggtgaataccgaagacggccgttttgttgcgcagcagaaagtggatagctccggcttccttagcgcgccggtggttgtcagcgataagctgatgattcaggccaaaggcggcacggtctacgcgtttactcgctaattatcgggtaatacactggacgaaagctaaactttcaagggtgtgattaccgaacacattggctcttaatatgagtccctaaacggctcctgaatagttcaggggccgtttcgtattctataaactccgctgtccgtgttgttcgatagcgttgtaacgaattgaaaaataagtaatgaggcttcaataatgatacctgtcatcgccctggttgggcgcccgaatgtgggtaaatccactttatttaaccgtttgactcacactcgggatgcgttagtggcggatttccccgggctgacgcgtgaccgtaaatatggtcgtgccgaagttgagggtcatgagtttattgttatcgataccggcggtattgatggcaccgaagatggcgttgaaacacgcatggctggacagtcgctgttagcgattgaagaagcagacatcgtattattcatggttgatgcgcgcgctggcctgatgcctgcggatcagggcattgcccagcatctgcgtagccgccaaaaagccactttcctggttgctaacaaaaccgacggcatggagcctgaagcggccgccgccgatttctactctttgggaatgggagacgttcacccaattgccgcttcgcacggtcgtggcgtagctcagctgattgaagaagtcatggctccgtatatggcgccggtagaacctgaagttgaattgactgaagaagaagccaacgccgcctattgggcagaactggaagcgcaggatcaagatcaggcagaaggggaagaaccagaagaagacgatttcaacccgctggatttgccgatcaagctggccatagttgggcgtcctaacgtaggtaagtctacactgaccaaccgcattctcggtgaagagcgtgtggtggtgtacgacatgccgggcaccactcgcgacagtatttatatcccaatgacccgcgacgatcgtgaatatatcctgatcgacaccgccggtgtgcgtaaacgtgggaaaatcactgaaaccgttgagaaattctcggtaatcaagaccctgcaagcgatcgaagactcgaacgttgtattgctggtgattgatgctcgcgaaggtatctccgaccaggatttgtctctgttgggcttcatcctcaatagtgggcgctcacttgttatcgccgtcaataaatgggatggcatgagcgaagaagctcgcgctcaagtgaaagacatgctggacctgcgtttgggcttcgttgatttcgcacgtattcactttatctctgctctgcacggcagcggcgtaggtaatctgtttgaatccattcaggaagcttacgattgctctaccaaacgtgttggtacctcaatgctgacgcgtatcatgcaaatggctgaagaagatcatcagccgccgctagtacgtggtcgccgtgtgaaactgaaatacgcccacgccggtggttataatccacccatcgtggttattcacggtaatcaggtgactgatttgtccgattcctataaacgctacctgatgaactatttccgtcgttcattgaaagtgatggggacgccgatccgtattcagtttaaagagggtgaaaacccgtttgctggcaagcgtaacaccttgacaccaaaccagatgcggaagcgtaaacgcttgttgtcacatctgaaaaagaaataaagtaagctagcagggcgcggatattccgcgcccttcgtgtttctggctaatggctaaaagtattgtttacgaaatgagtttgggaagacgttatgtcatgggaaacttggagttttgcgtttagcgtaacagtaccgaatttattgatgatgttacttggcgtcatgttgcgacgctggcgtctgatggacgacagtttctgcgacggtgccacccgtctggttttcaatctcgctttgccttgcctgctattctttagcgttgccactaatcacgttagtctggccgatcatctaccattagtgatttacggtgcagtcggcacgttgattaccttttcgctgctggaagtggccgctcactggctggttaaagagcctcgtgagcgcggtgtattcgtgcagggcggctttcgtgccaataccgccatagtggggttggcctacgcgatgaccgcttacggtgatgaaggaatggcgctgggggcgatgtatctgacggtcacggtaatattattcaacgttctgtcggtgatcacgttaactcgcagtctgaacgcggccaccgacggaaaaatcagccagagcgccttattgaaaagtattgtgactaacccgctaattatcggtctggtttgcggcttactctatgctcaaacccacctgccgatgccgcaggttattcagcaaaccggtggttttatttccgctctggcactgccgctggccttgctttgcaccggagccagcctggactggaaggcgatgtttcgttcttctaacgtggcggctttggcatcctccgccaaactgatttttgtacctttaatcatgacattaggcggatggttgctgggttttcgcggtgctgcactgggaattatcttcctgttttcagcgacgccaacggcggcgggcagttatgtgatgacgcgagcaatgggcggaaatgccactttagcggctaatattatcgccattactaccgtgggatcgttctttactacggccttgggtatttatttcctgcgtacattcggcgtgatttaaggagaaaataatggaagctctatgtccggtgtgtcatacagcgatggatgaggtaagtagtcactttcactgtgctacatgcagtagcgactatcagccgcaagcgatttgcccagattgcgaaaagccgttacaggtgcttaaggcctgcggcgcagttgattatttttgtcagcacgggcatggtttgatttcgaaaaaacgcgtgaaatacgagtataccctgcatctttaacgccgcagcgagttgtcaattgtcttactgacacactggatagcatcgtacctggtgacgataaaaactgagctatttcgccgccgttcgcggcttacgtgcttttttcaccggcgttagctgcgtaatttcactttccacccaaccatcctgcagccgggttttcagcgtatcacccacctgtacttgctgagtggtttttagcagactgccgctgggggtttgggtcacgctatagccgcgtgccagtgtagccagtgggctaacggtttctaactgagaacaggcaatcccaaaacgttgacgataagcgtttagctggcgctctagcgcctgtttcagacgatattcctgctgctgcacttgttgactgtaacgatggatacgtccctgcggctggacgtgactcagccgttgttgcaaacgctcaacccggcgaacttgcaggcgaatttggttttgagcgcattcttccaaccgacgttgcagtttaaacaacaacgtttgctggcgcgccaaacgcaaatgaggatgctgttgctgtaagcggtgatgcagttgggtaaattgttgattacgctgcgccagataataatccatcgccatttccatgcgctgttgctgcgcttgaatctgacgcactaattccagctgattgcggctaacaatttcagcggcagcagaaggcgtcggtgctctcagatcggcaacaaaatcggcgatagtcacatcggtttcatgcccgacggcgctgacaatcggaatccggctggcaaatattgctcgcgccacccgttcatcgttaaaactccataaatcttccagcgaaccgccaccacgccccacaatcaagacatcacactcagcgcgccgattggccatttcaatcgcgcggacgatttgcattggcgcttcggcaccctgaaccaaagtaggataaatcaccaccggcagcgaaggatcgcggcgctgaagcacctgtagcacatcgtgcagagccgctccgctggcggaagtaatcacgccgacccgtttggctggggcagggagcggctgtttgtgcgccgcttcaaataatccttccgctgccaattgtgctttcaattgctcaaactgctgttgcagcaaaccatcgccggcaggctgcatactttcagcgattaactgatagtcacctcggggttcatacagagtgattgaggctctgaccagcaccatctgaccattttgcgggttaaaagtggtgcggcgattgctattgcgaaacatcgcgcagcgtacctgcgcccgatcgtctttcaaggtaaaataccagtgaccggaggcgggcttggaaaagttggatatctcggcggtgagccaaatctggcccatttccatttccaacagctgtcgaaccgtctgattcaggcggctgacggtaaatatcgaggtggcggaagttagtggcatgtgacctggatcaaattttaaaacaagtacttaattgatcgatattacctgcctcagaacggtaagcaagaaaatttatcagaaagtgctggaggcaaccgattacgctctgtataatgccacggcaatattttatcttttctcaaatcactctggtgagatattgcccatgctacgtatcacgaaagaagcactaacctttgacgacgttctcctggttccagcccattccacagttctgcctaacactgcggatcttggtactcaactgaccgcaactatccgcctgaatatccctatgctgtccgcagccatggataccgtaaccgaatctcgcctggccattgctctggcgcaagaaggcggtctgggcttcatccataaaaacatgtctatcgagcgtcaggccgaagaagtcagccgcgtgaaaaaacatgaaagcggcgtggttactgaaccacagaccgttacgccaaccaccactttgcgtcaggttaaagaactgaccgcccgtaacggctttgctggctatccggttgtgaccgaagattacgaactggtgggtatcattactggccgtgacgtacgctttgtcaccgatctggaacagcctgtaacggcggttatgacgccgaaagagcgtctggttaccgtaaaagaaggcgaatctcgcgaaattgtgttgcagaaaatgcacgaaaaacgcgttgaaaaagcgttggtagttgatgataacttccatctacgcggcatgatcaccgtaaaagacttccaaaaagcagaacgtaagcctaacgcctgtaaagacgaacacggccgtttacgcgttggcgctgccgttggcgccggagcaggtaacgaagagcgtatcgacgcactggttgccgctggcgttgacgttttgctgatcgactcatctcatggtcattccgaaggcgttctgcaacgcattcgcgaaactcgcgctaaatatcctgatctgcaaattgttggcggtaacgtcgctacaggcgcaggcgcaagagcattggcagaagccggtgttagcgcggtaaaagtggggattggccccggctctatctgtactacccgtatcgttaccggcgtgggtgttccgcaaatcacagcggtatctgatgccgtagccgcgctggaaggcaccggtattccggttatcgccgatggcggtattcgcttctccggtgatattgcgaaagcgattgcagcgggcgcgtcctgcgtgatggtgggttctatgctggcaggtactgaagaatctccgggtgaaatcgaactgtatcaaggccgttcattcaaatcctatcgcggtatggggtctttgggcgcgatgtccaaaggttcttccgaccgttatttccagactgataacgccgcagacaaactggtaccggaaggtatcgaaggccgcgtagcgtacaaaggtctgctgaaagaaatcgttcaccaacaaatgggcggtttgcgctcttgtatgggtctgaccggttgcccgaccattgacgatctgcgtaccaaagcagaattcgtacgcatcagtggtgcgggtattcaggaaagtcatgtgcacgatgtgactatcacgaaagaatcaccgaactaccgcatgggctaattccaagagctgcggtcggtgagttttgtcatcgtccgctgctcgcattgctcaatgactttgcgtcaattgcgtatgtgatgctgcgggcgttaactcactttctggcttcgccgattggaataggacgtttattaacgttgctgaagtctttcatttttattttatttattgacctgtttctggaatacgcctcacatgacaaaaaatatccataagcatcgcatccttattctcgatttcggttcgcaatacactcagctagtggcgcgtcgcgttcgtgagattggcgtttactgtgaactatgggcgtgggacgtaactgaagcccagattcgtgagtttaatccgagtggcatcatcctgtccggcggcccggaaagcaccactgaaaacggcagtccgcgtgctccagacttcgtgttcaacgcaggcgtaccggtattgggcgtgtgctacggtatgcaaaccatggcgatgcaactggggggccacgttgaaggttctaccgagcgcgagttcggctatgcgcaggtagagatcaaaactgattctgcgctggttcgtgatattaaagatgctctgaacgcggccggtgagccaattctggatgtgtggatgagccacggcgataaagtgacggcaattccgtctgactttgtcaccgttgctagcaccgatacctgcccgtttgccattatggccaacgaagaaaaacgcttctatggcgtacagttccacccggaagtcacccacaccaaacaaggccaacgcctgttagagcgcttcgtattggatatttgccagtgtgaagcgctgtggacgcctgcgaccatcatcgaagatgcagtagcacgtctgcgcgaacaaattggcgaagatcacgtgattctgggcctctctggcggtgtagattcttccgttaccgctatgttgctgcaccgtgccatcggtaagcgtctgacctgtgtattcgtggataacggcttattgcgtttgaacgaagccgatcaggtgctggaaatgttcggtgataaattcggtctgaatattgtccacgttgcggcggaagatcgtttcctgagcgcactggccggtattgatgagcctgaagccaaacgtaaaaccattggccgcgtatttgtggaagtcttcgatgaagaagcttgtaagcaagagcaggtcaaatggttggcacaaggcaccatttatccggatgtgattgagtctgcggcctctgccaccggtaaagcgcacgttatcaagtcacaccataacgtgggcggtttgccgaaagaaatgaagctgggtctggttgagccgctgaaagaactgttcaaagatgaagtgcgtaaaattggtctggaattgggtctgccgtatgacatgctgtatcgtcatccgttccctggtccaggtttaggcgtgcgcgtactgggcgaagtgaagaaagagtattgtgacctgctgcgtcgcgctgatgcgatctttattgaagagctgcataaagccgatctttacaataaagtcagccaggcgttcaccgtattcctgccggttcgttccgtaggtgtcatgggcgatggtcgtaaatatgattgggtggtttctctgcgtgcagtcgaaactatcgatttcatgaccgcgcattgggcacatctgccctatgatttccttggccgtgtatctaaccgcattatcaatgaagtcaacggtatttctcgcgtggtgtatgacatcagcggcaaaccaccggcaaccattgagtgggaataacagcccgaaataaataattttcgataaaaatccaacccccgtatatttcgggggtttttcatttatttcatttaattaattttgttaaatgaaataagatgtttattgttattttgtttttatattctacttctcacaattaatatttactcgtgatacggacttaatatattgaatctgtttattgaattgatataggtctggctatactctgagcggttagctacgcttggatgctattttgtatttcttgtatttcttgtatttcttgtatttcttgtatttcttgtatttcttgtatttcttgtatttcttgtatttcttgtatttcttgtatttcttgtatttcttgtatttcttgtgtctttaaccttggttttttatatccccatattgtctaggctgtttttttgaatgagggtaagctatgttattatgagaataataactaaagcatgtgataaaaaagaatgtttcagtatttttacttacgtcgagtttccagtatttcctgatgttgaaataattaaatttattcgattcgagtatcggttgtcatcaataccaatgggcgctctgatattaactatgctgcaaggtctatagttattcgtaaggatataaatgagttaagcctgcacgatttacaggagcgtataagcgctaagaatagttgcctgaacccactgataataccgataatacaatcgattttaaccatgctgttggaggggctaaacactatcttcattactatggtaataaagaaaataaagatggaaatggttttattgctgaaggtttacctaaaagaataaaaaggattgggttcatataatatattgtaccgatgcaggcaggtgatgacggaatgtgttgatgaatgtaaatggtgacatatgtaatctcatatactcataattatcgtcgtttaccctcagcgccgtggatgatcgatccggcacctgcacctgaaataatggaagctgctccccacatcatttattacatgatgggatttgcaccacgagagatattcgtaacttcttattaataagtatgagggatatgctggtagtcaataaataatgtcattgtcttaaacacacaatattgttttaaaattaataatgctgtcgttttactttatgttacccgttggggttgaacactatcgccttgacgaatatttacctatcaactaaatgtttaagttatagaacaccataatttacatcgctaacaggcgagataattattttttcacaacagaacttttcacctcagcgagctgagaaatacgctgcggtttagccaaacagtcacccgcatcgctgaatcaaatcgatgattactgtagggcgtacttagtgttttgtggagagaaaacatgtcgttacatcccccatctatacctcgcgttaacggcgtatcccgtcggcgtttattgggatatgtcggcgttgggttagtcgccagcttgatgagtccgctgtccctgaatgtttttgctgcttcaacctcaacgatgccgctcaatctggagcgatttatgctggtttcgcgtgctttgaccggtaagcgtcaacttaatccccatatcggccagcggatctatcaggtacttattctgcgcctgccgcagctcgatcaacagctggctttactccaaccgcttccggctggtgagccacaaaattggtcgcaggcacagcagggcattgcccggcaggtcttgcaggcgtggtatgtgggcgtgataggggaaggctcgaatgcggcggtgattagctacgagaatgcgctgatgtttgaggccgtgtctgatgttttagtcattcgctcctattgtcctaaccaacccggttattgggctgccaagcctgacgtggccatataattcaggagaatacttttatggctgatactttgcaggctgacgtgattgttatcgggtccggcgtagcgggagggcttgtcgcgcatcagctggcgctagcggggaaatcggtattgatactagaagcggggccgcgcttaccgcgttgggagatagtggagaacttccgcaatcagccggataaatcagacaacatggccgcttatccttctactccttacgcacctcatcccgaatttaatcctgataatcactacttgattcaaaaaggggaacacccttacgacgtacaatatatccgtgctgttggcgggacaacctggcactgggccgcttcggcctggcgttttttaccgaatgatttcaaattaaaaacgctgtatggcgtgggattagattggcccatcgactataccgcgctggaaaaatggtatttccgtgctgagcaggaactgggcgtttgggggccgaacaatgaagatttgggatcgccccgcgcgcagccttatccgatggaaccattgccgctttcatggaacgagcagcgaattaaaaccgtattaaatgcgaatggattttatgttgtaaccgagccggtggcgcgaaatagtcgtccgtatgatggcaggccgacctgctgcggtaacaataactgtatgccgatttgccccattggcgcgatgtataacgggattactcacgttgaaaaagccgaacgagcgggggcaattgttcgtccgcaggcggttgtttataagctggaagtgaacgatcggcaggaaattgctgcagccttgtttaaagacgctcagggcggggaacatcgggctgaagggaaattctttgtattggctgcgaatggcatagaaattccgaaaataatgctgatgtccgtcagtgaaaaaaatcctcgcggagtgggcaatagttcagaccgtgtgggacgaaatctgatggaccatccgggtattggcgtgactttcctggctaatgaagcgctgtggccggggcgtggtccgcaggaaatgacgtcaatggtggggttccgcgatggcgctttccgtgctgagtatgcggccaaaaagattcatttatcgaatttatctcgtacggacgaagtgacaatcaatttgctcaagcagggggatttacagctagggccgcagttggaggcaaaaatccgcgaccgggcggctcgctacgtgcgttttgacagttttcacgaaattttgcctcatatggaaaaccgcattattcccagcctaacggaaaaagacgccatcggcatacctaaacccgagttttattacgccatggatgactatgtgcgcaaaagtgcattgcatacccagcaggtctatgctgatgcggcgcggctaatgggcggaaccgaagtggtattccataatgatttcgccaacaacaatcacattactggcaccactattatggggaacgacccaaaagactcggtggtggatagtgattgccgtactcacgatcataaaaacctgtttatcgccagtagcagcgtgatgcctaccgtgggatcggttaactgtacgctgactatcgctgcgctctctttacgcattgccgaaacgttaaaggccgaggtgtgatatgaaaaagcaaactctggtctggctggcgttatgcggtgcctttagcgcgacggtgcaaggagcggaaggtacggatctgattaaacgaggggaatatctgactcaggcggcagactgcgtagcctgccataccaccaaagggggaaagccttttgccggaggattagcctttaaaacgccgatgggaaccttatattcaccgaatattacgccggataaagcgacgggtattggggagtggaatgacgaagagtttattcgggcgctgcatgagggaaaagggaaagatggtgagaatctctatcccgctttcccttacacttcatacactttactaacggatgatgacgttagggcgataaaagcctatctgtttagcctgcctgcggtacatcagccaaatcgtgaaaacgatatgccattcccgttcaatcagcgttggggactgtggttttggaattgggtgaattttgaagggcagcgtttccagcctgataataatcaaagcgccgagtggaatcgcggtgcctactttgtcgaggcgctggggcactgcggggaatgccatacgccgcgcaatttcaccatgggaatgaaagacagcaaagcctacggtggcgctgaaattaatggctggacggcatttaatattacttccgatcctaatgcggggattggcagttggagccaggagcagttggttcaatacctgcgcagcggccatgttgacgggaaagcgcaggcagccggaccaatggccgaagtgattgaaaacagtacccgtcacctgacagagagcgaccttaacgcgatggcggtttatttacgaactttgaaaccgctgaatctcgatgatgaaaccaagagccgctcagactgggggcaaccggcaaccggcgtcgattcgctacgcggcaaggcgtttagcgccgatgattacactgatggcgcgcggctgtatttggggaactgtgctagttgccacagttttaccggcgcgggagttaaggacggttattatccttctctgatgagaaactcagtggttggagccacgacgccgaataatatggtcaaagtgattttgcacggggtgactcgccagactaacgacggtgaagtgttcatgccgggttttgccaacaccctaagtgatgaacaagttgcgactctcagtaactatttgctgcaacagtttggtcagccgacgttgaacatcaaagccgacgatgtgaaagcattacgcgaaaactagcctgagcatagggtaatctgacgcgaaaggagcgaagcgtccgattacccattgccgaaatgatttttagctcggttttacccaatgcatcaaaatatattcgccatcttctcctttgccggtggcgattttctgccagccattttgctgataaaacgccagcgctcgctggttgcggactagacactttaacaccccggtagcggtcaattccctctgtaccgcctgtagcagtaattttcccacgccaagaccctggctgctcggatcgacaaacaggttatgcagaaagttttcctcccgaaaaaccgaagcaaagcccagccggttaccgtcctctaccgccaccaaaatcttttctcccaataccgctttatcgaagtcttccagtcggaaattttcctgattaatccagctaaaggcagcctgacgggaagccagatacagcgttcgtaaaaagggacgatcggcttcctgatattcacgaatgttcattttatccccctgagtagcgacttatcacccttgagccagagttgatcttatcttatcaaccgctgataatggtcgttctgactcggggtgccgcgctaactcactgtgtggctgagattttacccgtattacctgatctggattatgccagcgtagggaagtctcggcatcctctgggtaccgccttcttgaccgccggttgggaggaatatgtaccttcgacctaccgttttactcgcttctgctatcacagcttatctgttgtctccatcgatcgtcttttccgtggagatatgccaatgaaacgtctcaatgcattaaccatagccggaactgaccctagcggcggcgcgggtattcaggctgatttaaaaaccttttctgctttgggtgcttacggaaccagcgtggtaacggctttagtggcgcagaatacgcgaggcgtgcagtcggtttatgcgatagaccccgcatttgtggccgctcaattggattcagtcctgagcgatgtacgtattgatagcgccaaattgggtatgttggccaatgaaaatatcgttcagatagtggcagaaaagttacggcaatacccactggatttcgtggtattggataccgtgatgctggccaaaagtggcgacccgctgttagagcctgcggcggtggcggcgctgcgtcagcaattgttgccgctggtttccctgattacgccaaacctgccggaagcggcggcgttgttggattgtcagcctgcgactaatgaatgggaaatgtgcgctcaagggcgggaattactggctatgggctgtcagggcgtattgatgaaaggcggacatttgaccggtggggatagccccgattggctgtttacggctaatggcgagttccgtttctgtttaccccgcattgccactcgccacacgcacggcactggctgcacgctgtcggcggcgttggcggcgctacgaccaacacaggaaaactgggcgacaacggtctccgctgctaaatcttatctgcaaggcgcgttggagcaggcggatacgctggaggttgggcaaggaatcgggccggttcaccacttttatcgttggtggtagcccagccagactggcgctcagtttattcggcgatcaggaatgggcgggtgagagcgaacagcgccagcgcccgctgtaagtgaacggcgtcaaaaggattcagaataaagtgctctgcgcctttacgtgggcgaatgcagggtaataggctgatattaccctgctgatcttttttctgatcaaatacatagctgccgatgtcatgttcgttttctcgccatgaaatcatcaccgccgcgtgaggatgtttatcactttttggccgtatagcgaaaaaataatctccggcccagaacccgccgaactcgccgtcaatctgtcggtttttactgcagaacaccgcggaatcagcaacctggtcgatggctttcggcgtaatttcctgatgaagccgctgccacagcggacgaccattttccaactgccagcaggcttcaccgagataatcgttcagatcgcgccagtcttgctctaactgctggatcaaggctttatccagaatattgcggtattgctgcatgccgttaagctcgccttccagcgcctcgtaggtaatcaattccatcgtccgcgggcggcggcggaaggtcatccagagcaccattttaggaatacggaattcgatagactgcacgctcagccgatgcctattgcctttattcagcacaaaaccgttcgcggtgccgcgtttattctgatagttacgtaccaccatcacgctgtttagtcccatccagccggtgacgtagtgttcgtcctctgagttggcgacatccagatcgaccaccatttgtagaatcttgtcggtggtgactgtctttagcgccggagcatccgtcgcagaataatacaatttgggtatgttttgagaaaattcgaggctaggcatagaggcagatcttcttggtcaataatctggttcatagcttaactcaagttgtcataccgattgttgaataactgaatttagcgtggaaattcgtgctggggatcaactttttcctgcgtcgcgggtcttatgaactgaataacagggcggtgaaaccactgttgaatatcaaatgacataaaaaggattgcgataatgaaaggacagaaaaccctccattgtcttttactggggacgttattgagcgtgagttcatggagttttgcccagcaaacgttgaccacggcagagttagttcagcagccgcagtataaaagcagctggcaaaaaatgattaaaggacagaagaatttgcctgcctgggcgcgtaaaggtgccggaacctctgcgccaccagaatgggccgagtgggaaggtaaaaaatatcaggttggtaatatttgtaagcctcacgattgcgccagccatttcttgctggtggctttcagcgaggataaaaagcgggcttggggcgtgcggattagcgtagaagataagccagaagccctggaaacgccgagtcaatttgccacataccaatggttaggccagccggatgaaagaatgaaaaacttattgatggcgcagctcgagaaagatcccaactggaaataaacgccctttctgacgcggaaaaataaaacggcgcatttagcgccgttttgtttagcttcgctctattgaactgactatttctgcagtgaatggataaataagcgataccattcgctattgacggttggcagcgtgatttcaacccgttctaaccgcttcagcgtctggctgctatcgtaatcgatggttgtttcctgcaaagattgatagaagttatccaattcctcatcgctggacgtcatcatgtcctgaatcagtggggtgataggtaaaatctccccttgttgatagcgacgatgcgcctcgcggagccactgacgatgggaaaccacggtcatcggctgtggcaaatgagcatttaactgctcaataaattcacgtcgagacattccttccatggcggaaaggtggaagatattctccgtcggataatggctagaaccgagatgcgccaaagctttcgcggtgtaatccaccggagtcaactggatatcgccgtagacatcatcgaaggccatgcccatctgaacgctgctcttaaacagacggtaaaatgcctgtagctcgtcatagcgcgccagttctgaatcggcggtaatcaggcccaggcggaaaatattacaggcaatgccacgggcgacggccagattgacgatttcctcgccaacccacttactcgccacatagccttgatctgcaatgtgttgctcatcttgaattgatgactgctcattcaccacgcgatggccttgctgcccaatcgggctgaatacgttcagagtcgacgcgaaattcagaattttgcgacttccctgcgtggtcagacgcagcagttcaaccagacttgcaacgttggctttatacgccatttcaaatgactcaaggtgattcatgcttaccgccgaatggaaaataactcccacgtcctgcgctaagcgttgataaagcaggtcgtcgatacccaaacgcggcgcttttatatctccttgaatagtgatgatgcgttgctcgtcgcctttgcgccacagcgaccattcggtaagaatatttctcaaccgttgcaggctatcctgctggttatgacctcgtaccagacagtaaattttgctgtcggtactatccagtaattctcgcagcaggaaacgccccacaaagcccgtggcaccggtgaggaaaatagcatttccctgattgatagactgcgactgtggctgaatatcttccggtaacaacgcctgttgacgcaggttaatcacgtcgctgacgcgagcttgctgagtgattcggctcgccaattgttttaccgttggcgcaataaagatgtcgctgacgctgaccttatcatcgatagcggcattgatcagattcaccgcgctaaccgccagtaaagagtgcccgcccagctcaaagaagtgatcgtggcgaccgactttttcgctgtccagcaggctttgccagatttcggcaatcgtggtttccagcccggccagcggcgcttcataaggttgatgcaggaaggcattttcctgcggagccggtaaagccttgcgatccagtttaccgtttggcgtgatcggcatactattcagcagcacataggcggcgggaatcatgtaatccggcagacggctttgcaggtagtggcgcaaagccataggctccggcgcaggcgagttggcatcagccaccagataggcgaccagccgcttgctgcctttgttgtcatccagcgccagcactgcggcgtcactgatattggggtgatcgttaagcttagtttcgatttcgcccaattcaatgcggaatccgcgaattttcacctgatgatcgttacggccgtggaactgtagccgtccgtctgcaagatagctggccagatcgccggtgcgatacatgcgagcgccttcaaccgaacggaaaggatcgggcaggaagcgctcggcggtcatttctggtaggttcagataaccgcgagtgacgccaggcccgccgatatacacctcgccaataacgcctctcggcaccagattgccgtggttatccaacagataaatacgaatattcgccgttggacggccaatggaatcaatctggctgatacccaatttaggtgagtgagtggtcgcggtaatggtggtttccgttggcccatagcagttcaccagctcaggtttctcagggtaacgtttgagccagcgctccagcatttccggcgcggcggcttccccgctgatacatatcagccgtagagcgttcggcaacggcccgcggctttcttcgcacagtttgcgccagaactgatacggaatatccagatagctaatgccatattgctcacacagctgccagaaatcgctgctaccagccagccattgatcgtcccgcagcaccaaagtggctccagaggttaacgcggagaatatctcggacactgatacgtcaaaggtggtgttgcagaattgcagtaccttatcctgtgggccaagattccattggcggcaccaggtcaccatttgttgcaccagattgccgtgctcgaccaatacgcctttcggattaccggttgagccagaggtatagatcacgtaggccagattctgtggagccaggctcggctgcggatttacccctgtctcctgtaatggagcgcttactgctggcagtaattcgtgaggaacgccgcagtctttaaacagcggcagtgtcgccggttcagccagaatagctaccggtttggcatcttccagcatgaatttcagtcgttcaggagcaatatcatgtggcagagaaagataagcgccgccggccttcaggatcgccaaaatgccgacgatcatttccgggctgcgatcggcgcagatcgctacccgatcttccgctttgacgccttgttcgatcaatagataagccaggtgattggctcgattatttaattcgccgtaactcaatgaataggcgttattcactaaagctatagcgtccgggctgcgctctgcatgttgctcaaataaatgatggatacacaggtcggcaggataggactgcgccgtctgattccactgttccagcagtaattgcttttctcgatcggcaatcaaatcaatctgaccgatgacctgagcgtcgtttttcaccattgcttccagcaccgcgattaaatattgctggtggcgctgaacagtggcttcatcaaacagggcgctggcgtaattcagcgagccggtgatgattttattgcgttcccctaaactcagctctaaatcgaattttacccgactgaccggtggttcctgcaacttcacgtccaatcccaccatgttaaccgcgatatcgtcgatattttccagagcaaacatcacctggaacagcggagttttatccatgctgcgcggtggttggaggatttctaccacttgctcgaacggcagagcctgatgttcctgcgcgtcgagagtggttttccgcacctgtgccagcagatcggcaacgtttgaggtcgtggatagattgatacgtaacgccagcgtgttgacgaagaagccaatgacgccctcgcattcagcctggttacggttggccactggtgtccctattaccaaatcatcctgaccggacagacgcgacagcacgatcgaccaagcgctgagcagcgtcataaacaaagaagtaccgtgtcggttactcaggcggcgtagctcatcagaaagctcgctgctgagtacgataggcagactggcgccgataaaggattgctgaggcggccgcggccggtcggttggcagcgtcagacgttctggcgcaccggttagcagttgctgccagaatttcccctgttcatgccagaccgggctattgcgccattgctgctgccaaaccgcataatctggatattgaattggcaacggaggcagtgggttagcgcgttgttgtaacagcgccgagtaagtcactcccagctcgcgcaccagaatttccattgaccaaccatcggtaataatatggtgcagcgttaacagcaggatgctctggttgtctcgcaggcgcagccaactggcttgtaccagcgagtccttcgctaaatcgaatattctccgctcttcctggctgtatatttcctctactttttctgcgctatttgcctgttcgcgccaatcatattcaacgaaaggaatacctgactgactatcccgaagtctcaccacaggttcattctgtccggatgaagtaaagttacttcgcaatgattcatgacgtgcatataagatatttagcgtttgctgcaataccgggatattcacatcgccgcttaatgctaacgccatcagcacgttatagttggaatcactgtcgctaagctgggacaagaaccacaggcgctgctgggagaaggacagtggcagcggtttatcccgcgtagccggaacaataatggcagtcagcgttgtatcacctgtttggccttcacggtcgatgacttctgccagttggcttagctgcgggttatcgaacagcgctgccagcggaatgctgatattgagcaattgctgtagctggctaatgacccgaacggccagtagcgaatgcccgcctaactcgaagaaatggtcgtttcgtcctactttttctacgtccagcaacccttgccaaatttctgctaacgtggtttcaatgccagcccgtggtgcttcaaaatcgcgatgaataaaagcgtcttcctgcggagcaggcaaggctttgcgatccagttttccatttggcgtaatcggcatttcgttcaacagaacgtaagccgcaggaaccatatattcgggtaatagcgcggccaaatgattgcgcaatattgcaatatctggacgaggctgttcggtatcggctaccagataggccaccagccgtttgctgcctttaccgtcgtcctgcgccagcactgcggcttctttcacctgcggatgggaattgagctgggtttcaatttcgcccagttcgatacggaaaccacggattttcacctgatgatcattacgcccgtggaattgtacgcgtccatctggcaggtagctggccagatcgccggtacgatacatacgtgcgcctttcaccgtactgaatggatcgggtaggaaacgttcggcggtcatttccggtagattcaaataaccgcgcgtaacgcccggcccaccgatatacagctcgccaatggctccctgcggcagcggatcaccgtgcggatcgagcacatagagccggttattggcaatagggcgaccaatgctatccagctgcgtctcccctaaagtcggtacgtgagccgtcgcaacgaccgtagtttcggtcgggccgtagttgttaactaactgtggtttaaccggataacggctcagccagcgttgcagtatttccggcgcggcggcctcaccgccgaagaaaagggttcgcagcgatggaggcaacggatagtcactttcttcagataaacggcgcaggaattggtaagggagaaccatacgactaatgttgtagtgttcgcatagctgccagaaagttttggtgccggacagccattgatcgtcgcgtaagaccagattggcaccagaagtcagtgcggagaaaatctcgcataccgaggcgtcaaaggtagggttacagaattgcaggacgttatcacccagcccaataccccaacgttcacaccaagggctaaccaattgcaccagattaccgtgttcgaccatcacgcctttcgggttaccggtggagccggaggtgtagataacataggccagattttcgggactgacggctaccgtcggatttgggatttcaccatggttttgagtgatatcagacatcaggcacagtggaatattgcagccgctgaaacgatgttgtccctcgctttgcgccacaatcgccgcaggtttggcgtcttctagcataaaattctgacgttctggtgccgtatccggcggaatggacaggtaagccgcaccggccttgagtgttgccagcatagcgataatcatttctggggtacgatggctgcaaattgcgaccttatcctccactttaacgccctgagcaagcaggtgattggccaaatggttagccagattatttagctcggcgtaggtcagggacgtttgttgataggtgagcgcaatcgcttcgggatggcgctgtgcctgtagttcaaataactgatgggcgcaaacatctagcggataaggttccgctgtctgattccactgattgatcagtaggttgtattcgcgatcggaaagtagcggaatacgatcgacctgtaggttatcgtcacgaaccatcgcccgcagaacggtgatcagatagtgctgatggcgttcaatagtcgcctgatcaaatagcgcggtagcgtagttcagggaacccacgatcgaacgattgcgagtgcctaaattcagttcgagatcgaattttacgcgtgtaacctgcggatcgatcaattctacattcataccggttagcgccggggctacggcgtcgaagttttcccaagcaaacatcacctggaacagcggcgttttatccatgctgcgctgcggttgaagtaattcaacgacctgatcaaaaggtaattcctgatgttcctgcgcgctgaggctgaagtcgcgtacctgtgcgagaagctctgccacagtaggagcttcggcaagattaattcgcatcgccaatgtatttacgaagaaaccgaccagcgcttcgcattctgccgcctgacggtttgccactggcgttccgatcaccaaatcttgctgcccggaaaggcgtgatagtacgacagaccatgcactcattaatgtcatgaatagcgtagtgtgatgtttttggctcagacgacgtaaatcgtccgacagctgttgatccaaaacgatgggaaccgccgcaccgaggaaagactgctgagccggtcgctcgcgatcggacggtaaagtcatgcgttctggtatgccctgcaatttttgcagccaaaattggccgtgggcatgccactccgggctatccagccactgttgttgccactgcgcataatcaggatattgcagtggtaatgccggtaatgggttggtttcgccttgagaccaggctgagtaaagcacccccagttcgcgtgccaaaatctccattgaccagccatcggtgacgatatggtggataatcaacagcaaataatgctcactggcggcggtatgagccagactggcgcggatcaacgggccgtgggcgatatcaaatttatgggcgatttcatgctgatacagttgccagaaatcctcatcggcatgagatgacgcagcgaaatcatactcttgcagtggcgcttgtgtgccaaccggcagcagttgaacgtagccgaccccgttttccgcgtggaaaaccgaccgcaatgcatcatgacgatccagcaagtggttaaggcaacgctgtagaagttgggcgttaagtttaccattcattttcaacaataacggaacgttatagttctcatcgttgttccctagttgctcaataaaccacagtcggttttgcgggaatgacagtggaatccgcgcattagcatcaattcgtgcaatttgtgtggccgtttgttgcttggcctgagcaactaataacgccaattgagcaagcgttggctgggcaaaaaacgcccccatggtgattttgctctgccagcgggattgcatcttacttaagagcttcattgccagcagcgaatccccgccaatagcaaagaaactgtcattgcgcccaattctctcctgacagagcacttctccccatatttcatgtaattcctgctcggtgtctccttgaggagcctcataggattcgtgcacataggcattaaaatcgggggcaggcagctgcttgcgatcgatttttccgttaggcgtcaacggtaaatgatcaacggaaacataggcgataggcagcatgaattccggcaataacgggctcaggaaatcccgcagatggcgtggcagctcttccgtttcagtatttcccgccagtaccagatagctaacgagttgcttttcccctgatgcatttttataggcaataaccacggcttcattaacctgggggtggctcaataatttctcttcgatctcgccaggctcaatacgatagccgttgattttcacctgctgatcgtcacgacctaaatattccagagtgccgtcggcaaaataacgagccaaatcgccggtacgatacatacgctgatttttcgcaatgaaaggatcggcgctatagcgttcttcggttagcgcaggttgatttagatagccacgggtcacgccatcgccgctgatatacatttgtcccacggcaccgaaaggcacgggttttaactgattattcagcaaataaatggctgaattggcaataggtcggccaatggttggcagtgaatgggaagcgtcaatcagtgccacggtagcgtcaaccgtgcattcggttgggccgtacacattgaacgcggtaaagtgatttaacgctgacagacgcctccaggtctgaggagacaaggcttccccgccgattaacagaatcagtttttccacctgattaggcaaatcggagagtaataacatttccaattgggttggcgtgcagtcgaacacgtcaatggcattgtctttaagaaattgcactaaccgggctccatcaacgcgaacatcttgcggaacgatatggagctggtggccactcagcaggctgagcaggctttgtaatgaagcatcaaaggagatgctggagttgaggcaaacccttgattgtttagggtaatagtggaaaatttcctcgtttaacgcgtaatacaggttcataacctgcgcgtgttcgaccatcacgccctttggtcggccggtggaaccagaggtaaatatcacataggccagttgattaaccgaaagctgaggtaactgcagtggcgtatccggtgtatctatggcaagtaaggcatccacgtcataggtacggacatcactgctaccggctaatatttcctgacccaatgagtcaaccaacagcactgcgggttcggcgtcatgaagcacatcttttaaacgttcgctagggtaggcggggtcgagaggaacgtaacagccgcctgatttcagaatcccgaatagcgccgctatttgtaagcaactacgctccatgcacagggcaacacgcatatctgcctgaatgcctaaaccaattaaatggtgggcaatgcggttagccagcctatcaaactccagataagttaactgccgttcgccgtgacaaattgcgatggcatcgggcgttttttgcacctgttgttcaaatacctggtgaatacagctgtggttgttaaagtcgcattccctgtgattcagtgtctccagtagcagtaattcttcggctttaggaataaaattaatattgccaatagagcagggaaggttcccaatttcgacgctattttttaatccttttaatagatgactattaatttgagtgattcggttttcagctaaataggcggcattataaatccagcggaattgaccgtttaaggcattgatttgtaatgttagtagcgggaaactgtcgggatttatcctagagtgaataagaatgtcgccatcggtaatggccactgctaatgcatataaaggtttgttctgtaatagtttggtatttctcttcaaggtttcatggcgcagtacgatatctgtcgcatagctttgagcctgattgactcgctttatttctttattaagattttctgtaaaatcaaccaaggataattgatcacagatatcagctacatccatcggaacccaaggtgaggagagttgagaacagatatcttcgccctgacggaaggcgtgatagccaagctggaaactatgttcgccagaaaggctatgcaggtaagcggcaaacagaccgataattttcaaccaggagttatcgccggagtttggtaactcggaatattgccattccccaacggctaatctgctgcctccttcggtcttatcaagagaataagggaaatctaccgggttgaatctttgaagtttttccagccagaaaggctcatgcgtagccaaagtggccagttcggtagatagcgcttcggattgctgttggctcagaatcggtagccgatcgccagcggtcagatgaccttgttcggctaaggccgtagcgggaaccggggtgccgtccagcttgctgaaagcgctaattctgatatccgtagtagtggtcgttacctgccagccatcatttatgctatccagacgcaccagcgtgcctggggcgaataatgttttttctggtaaggtttcaacctgattaacgatgagtaattcattgttaattaatatttttaacttagttatcgcgggcggtacacctgccttttctgataacgccagtgccagattggcgatttgctgtgcatcctgtacctgccagttaataacggcggcggacagtgggtttcgcatgttttcaaacagcgttctgcgaggggaattggcccgcgcttccatgatttgacgatcgacttgcccaatggaattttgtggattggccgccagctgctcgaggataacgctgaatcgacggtggtggtcgaatatatcttccaggctgtgcagcctgtcacttccgtaaaagctgatggatagccctttaccgtaacctttatcgtcgaatacgacagaaaagccgtgggtttgggagccttttgcttttatccatttggtctcgcagtgttggaagggcgtaccgcgatcaaatagcatcagattaattgctgggccgaaactgaattcctgcttgttttttcgtaatatattttctccacgatagcgctgatgttttaatatctttgtcagctgcttattcatgtttctggcaatatccagaatattatctgtgggagttactgtaacttccagcggtaaagtattcgatgtcattcctatcaggtttttggattctttaccaatgcctgttaccgggaaactgaaactgagttctttaactccggtcaaggtatagaagtgagcagcgacggccgcaatataaatatgcgttggccttagattatttttctctgcaatgatctctatcgatttattaacagactcgtcgatatattgttcttcttttaatatactccgatcgttaggactgtgactaaggaatgaaagacggttagcattgctagccttctgcaagaaagtatcccaataggctttatccagagtgaagcgttttgactgtagatattcaatatcttttctagccagcaagtctggttcgtcaggaataatagtctccggttcttttccagagattaattcatcatatcggtcgctaatgcgttttgagatgagacccagactccgaccatccataaggatatggtggcagcgctgatagtaaataaatttattttgcggtaaacaaatcaatgaaaagttgagtaggttttcatcttctggcgaaatcaaagtagtgatatcagcctgtatccaggcgtccaaatcgaagctttcatccaaattatcagttttatcaattatatgtaaatttgtgtcaagagtgttatctacatattgatataactcgccgtcgatggccttgaagcggcttttcatcgcaggggtttctgcaacaatgccacggagtgctgtttcgaaaacagagatgtttaaatttccagtaatttccgcatattcggaaatattaaagggtaggtctggcgataattgctgtatcagccaaacttctttttgtcctaatgttgctggggagtaaacacagtttccgttattctgcttaatgctgtccatcttacttttccctactggataaatgccaatttgtcatattcatctgaaaatgaatgcggaaaataaatagcacaaatttattttattgtcacagtgagataatcaaactctaattattatgtcttaagaaactaaccttatgttttaaatgattttattttcagaataggcgtggtggacacccattatttgatttaagtcgagttcatcatttaagtaaatgggcggaagtctgttgatgctaatgaatcgctattcttatgacttgagacaatctttaacttgttagatatcacgtattaatctttatcttatttacgattaattagtatcctgataaattagtaaatgaataatatatggttaatatactaggtaaaaatatctacggtgataaattaattatttaacgtgtaatttaacttaaagaggaccaatccatgttggttggatatgcccgtgtctctgcggatgatgaaaaattgaatttacaacgcgattttttaaatcaggtagggtgcgaaaggttatttgaagaccatttcaacggagcaaaagtggaacggcccggtttacaacaagcactaaactttgttcgtgctggcgatacactcgtagtgtggcgattagatcgtctgagtcgttcacttaaagatctgattggaatgatggcattattggaaacaaaaggcatcgcgctaaaaagtattgaagatggtattgatacctcgaccagctcgggggagcttatttttcgactttttggcgctctggctaaatttgaacgtaatgtgatcaaggaaaggaatcaggcaggattaagggctgcgcgcgcccggggccgtaatggcggcagaccaaaagcgctgagtcaggataaacaggatttggcggtaaaactttatgatgagaaaaattataccgtggcgcagatttgccagatgatggggatctctaagcctacgctgtataaatatcttggtgccgccagaggtggccgcacggaataggatccatgtctctcggtcgatccttgcagcgttcagcggattgtatgttaggaattgattaattttaatcacgccttgatcaccgtagaaaccaagcgtcagatctggatacagggagggaagtcttggggcgcagatgttcgccccaatccaataaggaaagaatcagcctaataatgcgcagtttggcggtagacgacataagagtgccgcaggcatcacttcaattcggaactggctaccagacaggggttcgccatccagattgaatctgatgtcatggggtgcgctgatttccagccagggtagcgtggcgtcgatgacatttttgttttcttcgccgctgaacaggctggtcagcagtgcgggcagaagttcggtggccgtaagcagtcgcagctgtagtaagccgtcattaatcaatgcgttcggacaaagttcttgcccgcctccggcctgcttaccgttcccaattccgatcaccagcgcttcaccagaccaatgaaaatccgggccgcggatctcgcattgatcggcttttaatgtgtccatacgcattaaaccgtggacaaagtatgaggcaccgcccaacgccgatttcagcatcgcaggcgtttcggtagtaatgcgtgcgccaaatcccccggttgccatattgataaaataacggtcgtcattaactttagcgatatcaataggaacggcgcggccttttatcgccagctgcaaggcattatcgatttgcagaggaatactacaggcggtggcgaagtcgttagccgtaccgagaggcaaaatgcccaggctgggaagcgtatggccaggtggtaaagccgctaacgctgccgcgacttcattgatggtgccatctccaccgccggcaatcacggtatcgacccccagtgcgatagcctcgttaacataacgggcggcatctccctgttcccaggtggtacgcacatgtagggttaatccctcatctcgcacgttttttactgcattacgcacttctggatttccgccttctttaccgttgagaataagaaggctgggtggcgtttgagtcataacatgctccggaggtggtaggttatatcactaacagtaaaccataacgctttgctctgactatcagaatatttgagtaaaatcgcagaaaataaaaagtaagatcgggtaggttgattcctataaataggggatagcgtagagttattctggattagaattaaactggattcggagtattattacgttaattcgggttaataaattaagtgaaatttattgggttattagcgattattttaacgcgttaggttaattatttagtggtgaaaaataacttaaaattcaattggttaagaaattaaaaagaaaaggccggcccaagggagattgggccagccaaggaggtggttcctagtcttgctgtctaactattttagttctttattgtactcgagctatagtaccttgcagacattataatagatgtgatctatttctaatatttgtcaaaaatgccactcattgagtggcattagatattaagtctaaatactactgtttttcatgcggattacgcgtattagttccatccagattacggattagcagtgcatattccacatcgatttcttcgggaatgggcaaatacatgatatgtccatttcccggagcaacctcagcagcctggccttttttatccagcatgctttccagcgtaaactgaatattgccggttggggtcattaattcgacgctatctccgacggagaatttatttttaaccaccacttccgccagcccatcccgccggtcgccggtaaattctccaacaaactgctgccgctcggaaactgagtagccgtagtcataggtttgttggtcttcatggacgtggcgacgcaggaatccttcggtataaccgcggtgtgccaagccttctagcgtggtgagcagcgaaggatcgaaaggttttccggcaactgcatcatcgatagcgcggcggtaaacctgagcggtgcgagcgcaatagtagaaggacttggtacggccttcaattttcaacgagtgaacgccaagctgagtcaaacgctctacgtgctggattgcccgtaagtctttggaattcatgatataggtgccgtgctcatcttctgaggcggtcatgtattcccccggacgcatggcttcctcaatcataaagactttatcggtcggtgcgccgatacccagcgttggttcgacatttttcaccggaattggctggtgaatatgcacgatattgccgatatcgtcctgtttgccttcttcaactttatattcccagcgacacgcattggtacaggtgccctgattcggatcacgcttattgatatagccggagagcaggcaacggccggaataggccatgcacagtgcgccatggacgaagacttccagctccatttctggcacttgttcgcggatttcagcaatttcttccagagatagctcgcgggataaaatcacccgagtcagccccatttgctgccagaatttcaccgtcgcccagttaactgcgttggcctgcaccgacagatgaatatccatctgtgggaaagcttcgcgcaccatcatgatcaggccgggatcggacataatcagcgcgtccggccccatatcgatcactggtttcaggtcgcgtaggaaggtttttagctttgagttatgtggggcgatattcaccacaacgtagaagcgcttgcctaaagcatgggcttcctgaatccctaaagccagattttcatgattaaattcattattgcgaacgcgtaggctgtagcgaggttgaccggcatacacggcatcggcaccgtaagcgaaagcgtagcgcatattcttcagcgtaccggctggagacagtaattcaggtataaacatgggagattctcagtctgagttcaagtcagaaccacgccctggggagtggcaaaagccgatgattgtagcgccagaaaagcggaaaatcagcccttgcacaatttttgtagggtttaaatgatctggatcaaaatagccaagaagagcgcggcctgttactgccgcgcagtcgttagtagggtacaaattaatctacagcgtcaggtctttaatggtggtggtggggccgtttttcgttacagaggcaatgccatttttagctgcggcttcagaactataagattcgctgacgccgataacttgatgattcttggctttcagcacaaagtaaggttcatttttaacgttgtgctttaattcgtattgagcttccaggggagaattgctttggactgatgcgataccattttcagcggatgctttactggcgtacatctcgctggagagaataacttcattattgccggctttcagattgaaataatattgaccgttcttcgcttttttaagctcatagtagccgatggccatagtgtttctcctgttggttgagtagtctcctaatcagtgtagtcaacgctatccataatggagattcgcgtacctgactcagccaacataacgcacctttggcataaaatacattagagcaaacgacccatttcagcctcccagcggtagcccattccatatactgcgcggataaagggcttttcttcatcgaaggactccagttttcgtcgcagatttttaatatgactgtcgatggtacgatcggtcacgacccggtagtcgtcatacagattattcagcagttgttcacgggaaaatacgtgccccggctgcattgccagaatcttgagtaaacgaaactctgctggagtgagatccagggtgtgaccctgatagctggcgtggaagcgtgactcatcaatttgtagcggtgccatgtcactgggcatttctcgcgggctatagcagcggcgcaaaatagttttcacccgagccaccacttcacgcgggctatacggcttgcagatataatcgtcagcgccgatttccagcccgagtaaacgatcgatttcctcagttttcgctgtgaccatcacgataggtacatcggaaaaacgacgtatttcgcgacagatactgataccgtcgctgccgggcagcatcaaatccaacaggataatcgctggcggagcttgccgtaccgaggcgacgacttcagcaccattggtcacccatcgggtctggtaacccgcggcctgtagataatccaccaacagttgcccaagcttaggctcgtcttcaacgatcagtaccgggccatgttggcctggggcgaaaatagcttcattcatggatatttattttcctggtgaatgtgacaacggaaagtctaccttaatcaatacgccgcccaaaagtgaatgttcggcggcgatttttccgccgtgggcttcgacgatattatgacaaatggccagacccagccccgatccgccactcgctcggttacgtgaggtttccgcgcgataaaagcgttcaaagatccgctgtagctgttcgtcgctgataccgggtttgctgtcttgccagcacagcgtgagggcattgtcatcgagactcatgctgatattcagttgcccaccgttgttggtatagagcaggctgttttccatcagattatggaatagctgggtgaggcgatccgggtcgccgaatatcatggcctgtccgggtaagtgagttgttaccgtcagccgtttttcctcgatgcgacttcggaaactggcgagcgctacctgcaataaatgcaccaaatccagctgagttttacggtaagccagtgccccgcgatcggacatggaaagctgatgcaaatcgttgactagtttggttaacatcgccacttcggcttgcaaggaactgagtgattccggcgtaggttggcgaacgccgtcctgtaaggcttccagctcgccgcgtagcacggccaacggcgtccgtaattcgtgagagacgtcggccataaagtcgcggcgcatttgctcatttttttccagcgagctggctaactgattgaaatcttgtgccagtcttcccagttcatcgcggctactgacggctactctggtgctgaaatccccggcagccagtcgatgggtgccttccaccaaacgttttaccggagccagcatcccccgcgaaagtagccaggttacggcggcggctagcaaagtggagagggcgacaatcatccaactggtacggcgttgttgcaggtcaaaattgatatcggcatcgcgagtgagtttttccgagggggtggcgatcacccagccgacgatctgatcgtcatattttatggggaggcgtgaaccctctttaggcactgctccggtgtggccaaccaacagcttaaagtgactgtctactacccaaaactgggtgcgccagccgcgtggcggaagattatggctattatcgctgttttgctcgaaggatcgcatgatttgatacaccacacgatcgttattacgcaggaaattccaattgccgtagtgcttgtattgttcttccaatgcgtcacccagcatggcgatacgttgctcattgctgtgcttgatataatcgataaaaccgcgctcaaagctagcacgcattccccaatgcatggtgattaacaccaacatacaggtggcgaaaatcgccataaataacttactggtaatgccaattctcatgctgtcctcatttctggcctgttgtatccagagtgcggtttttacgaatatcctgcggtactttggcaaagattaacgccggtaaggcaatgacaatcgccatgcagagatagctgtaaaggaaggcgctgtgggtcgccggtgagttagtgacgacctgattgtgggcaaacataccgagaacgatcccggcgatgctaacgcccatactcatagccaactgcatgaccatggataacagactgtttccactgcttgccagcctgtcgggcaagtctttcagggttagcgtattcatagtagaaaaccgcaaagcgttgagcattccctgaaagaataaaaccactggcagcagccatagccagcccatcagagcgactaacgggaagctcaggctaaccaccgccagtagcagagtggcactgaccaatacctgacgatagccgaagcggttaaccacttgcacgataattcgtttaattcccatgctaccaataatcatgggaatcatcatcagaccagcgtggaacggagtaaaacccagaccaatctgtaggaaaatcggcgtcataaaaggcagcattccactgccgatacgccccgtcatactgccaattagccctaaagtgtaaactttattcttgaacaatcgcagcgagaatagggctgaaggattacctttggcgtgccacccatagcccagcagcgccagcagcccgcaaataattaatccaacaatggcggcggggtgcaggccaagtcctttatggccgtcgagcgccagtgtcaacgtagccataccgactgccaacatcaaaaaaccgctgatatcaaaccggcgagtttgcatggtgtaattaggcattaacatcagagtggcaatggcgcctatcaatccaaccggcaaattaatcaggaaaatccaatgccaactggcgtactccaccagaaaaccgccgagcgctggccccatcagcgggccaacctgtccaggcagagtcacaaaggccatcgccgccatatattgttcgcgtggaacgattttcatcacggttaaacgaccaactggcaccatcatcgcgccgccgataccttgaatgacgcgggagaaaactagctcattcagggacgcggatcgagcgcacatcagtgagccaatggtgaacaggataatcgcggagaaaaacacccacttcacgccaactcgatccgccagccagccgctggcagggagcataactgccacggtcagcacataagaaacaaccaccgactgcatacgcagcgggttttcccccagactggcggccattgacggcaacgcagtgttgacgatagtggtatccagcgcctgcatgaaaaagccaaaggcgacgatccacaactgccagcgaaccgacgtggaccgaagcggcgttagcgtttctggggacatattactcaatcctctgtaggggctgacggctaaaacggctgcacaggcgatcgaaacacaggtaaaccgccggtgtagtataaagcgtcaaaagttggcgcataatcaggccgctaacgatgctcatccccaaggaggggcgcagtttcgcgtcgtcgccgcagcctagaaccaagggcaagacgccaaatagcgccatcagcacggtcatcataatcgggcggaaacgtagcaaactggcctgaaagatagcctctctggcattgagattgccgtttcgctgcgctgccaaagccaactccaccatcatgatggcgttatttttcactatgccaatcagcaacataataccgatcagggctttcatactgaaaggcgcgtcaagcaccgccaaagccaacaacgcgccgacgccagcggaaggtaacgtggacagaattgtcagtggatggacgtaactttcattttatccagcgaactgacgtcctgcgtatattgccgggcgacttccatcacgactttgtattgatttaacggctgataatgataaatagtggagatctgtcgttgcccaaaagcgttatttagcaatgtattggcatcggaaacgcgggtgcccaagcgcgccagcctttcacgatcgacagtcagccccagcttggcacctttgtgttgttgagcggcgttaacgtccgccagctctggcggtttggcaaatgcggcgcgaattttggctccccagatgcgccaagcgctcagaacgcccacctgtaaagtgtcgtggttactggcgttagattgcctgccgccaatgcggatatcctgtgctgcggctaaaaacaggctggctcccggctctttggtaccgcttgcttggccgccggtgtgaagtggcgccagacggtaatggcgataatcacgacggccaccagatctgccagaattaccgagcgggaagtgcgtataggtttggcattcatagtggcgaaggattctcttttatgcttgtgattttacgtggagacgatccgtaataggcgttagccagataacttatattttattagtttagctgtcttttcacggagaataatgaaggaaatatggaatagaaagctgattcttttcagttttgtctgggtaacgttctgttttgtaaaaaatacggcattttaaaggatggcggcgcggaaaaaagccattgtgtcaatgagtcacggaaaggaagaaggctgcggataggtgtcaatgaggcaggaaataaccgttagttaaccggtgcatcctgcctcaacacattcactatttttaacgatacagcgtttgcgcccagcgtgccagaccagcggtaacggagccaaaatcattgcccccaaccagcggaatgcccggtaactgttgctgtagtgcgctgcgtaacagtggtgaacgggcgctgccgccggtcaggtagatcacgtctggcttgacgttgctggtggacagcgccaggttgacttgttcctgaatgcgttgcaacggctgagtgatggcatcggccaattgctgctgactgatcatttgccccaactcaggtttgacgaagtccagcgccgtggcgatctgctcgtgctgagacagcgcaattttgctctcttctgccgctcttaccaaacggtaactcaaacgctgttggtagactttcaacagcatttctacctgttgcgggttagccgcatcgcgaatcaaatcacgcaggaaacggccgttggccgtgctgtagaaatcgctctgcgccggaacatcgttggtggctaccgcattccagtaaggcaatgaaggcattgcgatgcctttttcggtttcgctacccataccaaacagcggcattaactgtttaaacgccagcatgatgtccagatcgttaccaccaactcgacagccgctgtgacccagcaggctttgctgacgatccgccatgccctgccagtttggtcccatcagtaacaccgaacagtcggtggttccgccgccgatatcgacgaccagcacggttttttcttcggtcagcgtcgcctcaaagtccagaccggcggccaccggttcaaattggaaagcgatatcgcggaaaccggcacgctgtgcggcgcgcagtaaaatgccttcggcctgacggttagcgtcttcgccgccagagccctggaagttaactggacggccaatgacggtctggctgatttcggtttgtacggcagattccgcctgacgtttgatgtggaacatcatggcgcagaccagatcttcaaacagggcgatttgctgaggttttaaaccggtcgccccgaggaaggatttgggggatttaacgaagtaaacttcttccggatcttcgatgtattgagccagcgccgacaggccaaaatgcaggctgtccgcattgactggaatatcttcttcacggttaaaagcgatggcccgccgtaacaactgttggttttcatcgctgccggtgggcacctgccagtgacgatgcaggcattcacttaccgcctctcgcgtgggcgcgcataacatggaaggcaaataaacgtcgttattttccaataccagcagttcgggagcatcgtcccgcattatggccacagaacagttcgccgtgccgtagtcaaaaccaatgaacataattgctcccaggccaaataaaggggggcgactttaccttagagtgcgcagaggagcaatcgacaaatcagagtcattggcgggaataattcgggtatcggttcaggttttctctaaatgacatttttgaatctgccgtaggctatttattgcttaaataaccgcagcctaaaatatcggtcagacgtgcggtgcgggcaatactgtcaccgtcgaccaaatcgacgccaatatgactaagtttatccaggatcgccaactgatcggcaggccccgcgagggttttgaccccggcttggtgagcggcgccgttgataatcgagaccatcacttcgtccatttgattggtatgaatattggcgatcagaccgacgtcgagttttaaataatccatcttgaggtgatttaacctactgaaaccattcatgttggctgaaaaatccgtcaggataagtttgccgcccagcctctgcaggcgagtgataaaattatcgatagtggacgaatggcgcagcagcgtagattcctgtatcaaccaatgcagatcggaggctggaatgacggattgttgcaggctatccagcaaaaagtggcgaaagctttcttcctgtagcgattcttcggataaagccacggcgaccttgagcgccttactttgaatattttcgccctgtatacataacaattggtggcagatccatttatctacctccgggcgcaggccataaagcaaggaggccgagagaaaatcgtcctggctcacggcctgtttgtcattcgggataaccgacgggaccagttggtagaaagccacgttattcggtatgagcggcggagcggcggcggtagccaaaagctctagctgattctcttccagaatatgcagaatttcatctttgctcagtagctcatgctggcgtgccaacagctgtttttgccgtggctggaagagatacacctgcccacgaccactgtgtttggcggtatagcaggcaatgtccgcctgctccatcagttcactacgcttgctgttttgactattgatttgggttataccggcgctggcgccgatacggtattgcttaccttcccagtagaacgggtagtcattaatcagcgaaaccattccctgcaccacggttttagctctggtgacgctgcagttttgcagtaacaggccaaattcatcgccgccaagacgggcaacgcaatcgctagtacgtaaatacttacgcatcaacgcgctcaattctgttaacaacgcgtctccggcggcatgtccggctgtatcgttaaccgctttaaagcgatccagatcgaggaagcctaatgcgtgctgttgattatgttcgatgcttttttgaatcgcatttttcagctgatactcaaaattcgcgcggttaggcaagctggtcagattatcgtgcgaggcgctgtagctgagtttacgcatcatttcgcgcgattcgctgacgtcctggaagaccataacggcaccgacggtttccccttccaaggttttcagcggcgcgacggaatccttaatgtcataacgttcgccgtcccgattgtgcaaaatcagcgaaaggttattttgcggcggtgaaaccccgttaagacagtaccagaccggattttccacgtttaaaccggtgctgctatcggttaagtgaatgatttgatcgataggttggccaagggcgatggtattggcccagccggtcattttttctgccaccgggttcataaaggtaatatgcatttcccgatcggtactgattaccgcttcaccgatggcgtccagcgtgatatgcaggcgttccttctcttcgtgcagggcttctgtcaggcttttcacttcggttaagtccagcgcagtgccgattaaacgcaaaatatcgcctcgactatcgcaaatcatattggcctgattacgaatatggctgatttggccgctgcgagacacaatgcgatattccaatcgatagggctgacagtgagtcagcgccgcggcaaattcgcggtcaatgcgcgcacggtcgtcgggatggatgcgatctcgccatgcctctatgctaggaatcgtattcggcggcagatcatacagttcgaacattcgtttatcccaactgatggtgttctctttcaggttccattcccaaattcccactccaccggcttcattcgccagggtaatgcgttccatcagccgacgattgaccatttcggtttttttcaggtcattaatatcttcaacctgagaaataaaatagagcggacgctgctcgtgatctcgaaccacgctgacgaccaatagcgcccaaaccacttcgccgtcgctgcgaatatagcgtttctccatggtgtagctggggatcacgccgtcaaacaggtcttccaatagcttgagatcggcggtgagatcttccgggtaggtgatttcctgaaaggttaaattgagcagttctccttggctgtagccgagtaaattgcacaaggctttgttgacctgtatccatttaccttccggcgacaccagtgccataccgatggccgaatattccatcgcgttccgaaaacggttttcgctctcgataatatgatctttttcagtgcgaaacgcgtgcatcaccatcgacatcgcgtgtggcggcactaacaccagtaatagcggaataaacgtaaaagcctgaataaatagctgaccgctcacctgattggtgaacagattgaaattaatcatcagcgcaatcaataccgcggtgagacagaagatgataaatgcttccaatcggggcagccgaatagcgacccaaatcagcgccatcacgatgaaagtaaaggggaagggtaggtaagtcagcgccagataacagcaagttaaagataaaattagcatccagatcatttcaaacagagtttgcgatcgcagggatgatctgaaatagccttgctgataaagcaacccaacgggtgccaacgccaatatgccaatggattcagacataaaccaaagggtgaatagctggccgaaatcgcggtggtccggagccagataaaatgctgccgcgaagccgctgagtatggggatcagcaaaactgccgtcaaaacaaatttaagccagctaaacaggctgtgtagcggatctttcggcattaacaggcggcgtagcagccaggcaccggcgatagactccaccagattgattagtgtcaaagggacagaaaaccagctagggccgtagagcgtgatattcgccagaataatagccacgccagcgacaagcagttgcagcggccaataacgtaaccgcagatgaaataaagccaccatcaaaatagcggtagggaaccacagcggcgcgaggttacgtgaagtttccgacagttggatgcaaaaaagcgcgagcaggtaaatcaggccgctgataagcgcgatgttcagaagaacatgatatgaatgatttcgtgctatcgctctgattctcatggcgaaccttatgtgtaacctgcgaattgccagcggcataggaaaaatgccgctggtttttgaatcctagtacagaagggcgatactgaccattgttccgcgcgttatcatggttgatatcgccgcgagaataagccctcgtttcacatgggttcctaaaaatgatagtgagatcagaccaaaaataacgttgccagaccgaggaaaataaagaaacccccagtatcggtaatcgcggtgatcatcacacttgagccaatcgccggatctcgccccagccgcgccatggtcattggaatcacgacgcccatcagtgccgcaaccaacagattaagcatcattgccagcgtcatgacgccgcccatggctaaatcgccgtacaggatataggtcacaatgcccataataccgccccatactatgccgttgatcagcgcgacacccagttctctcatcatcaggaatgaaatgttgctgttgcctaattggatatggtgcaacgccagcgcacggacaatcatagtaatggtctgattgccggtattgccgccaatgccggccacaatgggcatcaatgctgccagtgcaaccaattgagaaatggtatgttcgaataaacctattactcgtgaagcgataaaagcggtgcacaggttaatggccaaccaggaccaacgggtgcgaaccgcgcgtcctaccggagagaacacgtcttcttccgggcttaacccccccatacgacgtaaattggtgtcgctttcttcattcaccacgtcaacgatttcttcgatggtcagtcgtcccatcagcttgcctttggcgtccacaacggcggcgctgatcaagtcataacgttcgaacgccccggcggcgtcttctgccttttgttccggctggaaagtggtcggctcactgttcatcactttgaacacctgagtatccggtgagtgcagcagaatggtggtgaggggcaattcgcccagcagcgtattcttccgatcgatcacgaaaattttatcggtggcatcgggaatgctcttacgatagcgcagatagcgctgaacggttcctagcgtgatgtcggcacgtaccgtgaccagctcgaagtccatcatctggccgacggtatctcggccatattgaatcacttcccgcactcgcgctcgttgagccggatcgagtgacgtcagcaagcgccccatcaggttgcgcggcaggtattcggccaaataagcctgctcgtccacgtgcagattgcgcatggctttcagcaggtctttatcgctcatttcttcgatcaggctgtcccacaccgtttcggaggcttcaaccagcgtatggccgcgagagttgttatccaccagacgccacagcgccagacgttcatcttgcggcaaagcttccagtaaatcggcgagatccgcggcgtgtaagtcggccagcaaatgcttaatctcggcggtttgatccagcaattgttcatcgctgagtttttcccgatcgtccaggcgaccgagaataccgtcaaccagcgctttattattcagtaatagcgaaagaatacggtgacgaatagcggccagttttttagcgtcaaatttggcggacgttgggtgctgatgtacgtcggaaacggtaggggctgacatagtggtccttaactcaatgcattatggggggataaccccgctttttatttgttcgcgtcatgtcagggtgacagaggtgttcggcaaacggtggccgctatgcagccaaaatttttgtcacggttatttatgattatgggttttatccgcgtagcgcgattcgccacgctcaagactgtgggataggtaagaggtctgcggcagacatcttacctatcttaagaggcaaatcagctattaaggcgttaaatcaggctgaggcggcgtgtattcccgatccaccggttgctcaatctgttctgattgattacgttcctgatgatgaggaatcgccgcgattgccgcgtaaagtaaacggccaaacagaatgataaaactgaccagtaatatgattttggttaactgcgtcgattttttgtttctcatactcgtttttgcactgtgttgtccgttagagataagcatcaggggccagctgcgacccctgaattcggagagcatcggcgttaatccgtctcgttttctgcttctggcgcgtcttcttcctcgataatcagcttccagccgattacgtcattccaataagcctgttcccgttcaacatcgagctgcaccagactgttttgtgaaaagtagccgtaagggaagcgcagagtccaatgattatcatcggtgatcagccgtaagctttctggcttagtggtggactggcgttggttgttcagtaaggcacccaagcgtagcaactggatcagcggcaggtagtatttctttttaaacaggttaagacgcggtaattcatccagtttcatggctttacgatggaatcgcaccagtgacgccagtaataattgctgttcctgattaaagcccggtaaattggtgttttgcagaatataggctgagtggcgatgcattccgctgtgattgatactcagcccgacctcatgcagcatggcggcccatttcaacagcgcttcgagctgcggctgcaccaatttagggttttgctccatccactgggtatagagtagctcggtggtttccagcacccggcgcgcctgttcgcgatcgatattgtagtgatcggccagactttttgccgtccgctgacgaatatcctgatggcggaaacggccttccatttcgtacagcacgccttcacgcagcgcaccgtcggaaagacgcagatctttgatcgctaacgcatcgaatacgccgcacataatcgctaaacctggcacaaatactgattggcgatcttcagataaacccggcaggctcagcgcgctaaactgcttgaattgcaacacctgctcaaccagcatttccaaacgttctggcgtaatcaaaccgtctttttcacccatttcgaccagcacttcatgggcggctttaatcgtacccgaagccccaagagcgtactgccaaccttgaatgcgatattgccatgccagcgtttccaacttttgcgccgctgccagacgagcgcgcttaaagttagccttactgatttcaccattcgggaaaaattgctgagcgaagctgacgcagcccatgcgacggctttctgccaatagtggttcaaaatcttcgccgataaccagttcggtcgagccaccgccgatatcgatcaccagtttgcgacctttctccggctgagtgtgttccacgcccataaaaatcagacgagcctcttcctgaccggaaatgatctcgatcgggtagggaatcacttcggcggcgcgtttcagaaacacttcggcgttggcggcctgtcgcagggagtgcgtccccacgatacagacgttatccggcgagaaaccttgtagccgttcggcaaatagagccagacaggccagaccgcgttccatcgcttcttcgctaagaatattgttactgtctaatccatcagccaaatgtacgcgctgttttaagcggcctaaaacctgaagtgcgccgttaacgacgcgggcaatcaccatatggaaactattggagccaaggtcaatggcggcaatttcctgcggtttagtggtggagttactggttagcggcatagttttaggcctattgctctggttgttccagcgcttttaaataatcataaatggcaatctgtgcacgtactttgcgccgatttccgcgcggtacataacgattactcagttctttatcaatataacgggcttttaccgtgtcgttgaacagtagctctaagatatccaacactcgctgtttcagtttcgaatccagcagggaaacggccacttcgatacgataatcaatatttcgggtcatccagtccgctgatgagagataaaccagcttgtcgcctttattctcaaatacgtaaacgcggtcatgttccagaaagcggtcaacgatgctggtgacctggatattttcactgatgcccggcatattggggatcaaagaacacattccgcgtaccaataaacgaatcttcacgccagcactggaggcgctatataaccgatcaaccagtcctttatctactaaattattaattttcagcgtgatcccggcgctttctcccgcctgtgcatggatgatttcctgatcaatcaattgatacaacatcaggcgcgagttttgcggtgataccatcaaattgtcgaatttaactggcctataagggttctcaataaagttaaatacccggcgaacctcattggtaatgcgtgcatcggcagttaacagcgagtaatcgctataaatacgcgcggttttctcgttaaagttacccgtccctatatgagcataacggacgatttggtcgccttccaggcgggaaatcaggaataatttggcgtgaatcttcagccctggcgcagagaaaataacgtgtacgcccgcggcggtgaggcttttggcccagtgaatgttggcttcttcatcgaaacgcgcctgtagctccaccaccaccgtgacttttttaccgttatgggcggcgtgaatcatagattcaataatgcgtgagtctttggcgacgcgataaatattgattttgattgccagcacgctggggtcgaaagacgcctgacgcagtaattccagcacgtgttcaaaggtgtgataaggataatacagcagcacatcctgctcacggatcgcgtcaaaaccgttgcggaatttatcaaaccaaatatggcgtaggcgcggcatcgggcgattcaccagattgcttttccctacgttagggaagccgatgaagtctttgaaattgtgataacggccaccggcaatgacggagtcatcattggaaataccgagtttatttcgaagtaattccaccatttcatcgggcatatctcgctgataaacaaaacgcaccggctcggcggttaaacgctgcttcagactggatgacatcaactccagcaggctggactccatttccgtaaccagatcgtattccgcatcgcgggtcattttcatcgaataagcgttgagcgcatcgtaatcgaagaagcctttaaagatttcatcgagacaataacgcagaatgttatccaataagatcattggcttgcgacggcgcggagcttctggtggcaaattaacgaagcgcggcactttatcggaaggaatttccaacagcgcataggcgatttcctgcccgcggataatctcaaccgccagataggtgtaatcgtctttgagaaattgcaccagattggtgtcgtgattgatcagtatcggcgtaatgtgctgacgcaaatgctgtttgaaatattgtttgagccaaatctgctggttctcagaaatctggcgttcattgatcaggaaaatctgattccgcgccatttccaacagaagttcgttatacaggctgtcgaattcctgatcggctttgaccactttggcctgaattttctttagcaaatggcgagaggacacgccagagccttgctcttcgctaataagaattcgccgctttaagtcggcaaaacgaactttataaaattcatccagattattggagtaaatgccaagaaagcgcatccgctctattagcgggttgctcttatccgcagcttcctgcaatacccgttcgttaaaggataaccagctgagttctttctcggtgtagagcttttcctgacccattgcaactccattcagatttttgtgggagtatttagtgtccgtagacattattgcgagagattgacaggaaagtccaacagatatcattagttaacattgtcatgcaaacgccataaaactgacataagatgctcggtcatctcagcgcgcaagggcgaatgagttatataaatcatctataggatctagtgtagggcatggggcaaagcagagtagtaccactttcaggcagagatcgccgccgggctatgattgaccgcgtggtaggcaggatggtgagcggtagcggcctgctggtgctactgaccctgatgctaatttttgtctacctgctgtatgcggtgctgccgttatttaaaccggcggcgattagcctgcacgctcaatttcccgtgacccccagcgcctccaccttaagtatgggaatggattcccgaggggaaaagctgtggcgcatcgatgctcagggcaacggcgcttttattcgcctccagccggaaggtgagcaggctgaagggacgttactggcaactcaggtactttccgctcctcctacttcattgggacaggcttcgggattgcaggcgttgggattgagtaacggtagcctgatattggttcggccggattttagcggcggcgctcactggcatttccctttgggcgatcagccgcagccgctggatgaaaaaggacgtccgttgcgacatatcgccgtagcggagccacaatcacagcaattcacgctggcagccagcactgatgacgggcgggttttgctcgggaatttcactgaaaccgaacgaaaaatcacgccgctgccggaatccccgacgcggatagatcaactgttgttaagtcccgatggccactggctgtacttactgtcagcgacgcaggtttatctttaccagttggataatcgccccaaactgcgggaaatagtcgcgctggatcagcaggagccgctgcacttagcgctgttagctggcgggaaatcgctattggtacattcgccgcaggggcgtttgtctcagtggtttgacgtgccacatacccgggagcctcaggataaaccgccacatcttactcgtattcgcgagttctcttcggcaatggggctgctgagcgtggaagatcaccgccgggtttttgccacagtgactccagcgggagagttaacgctattttccagcattcaaacctctcctttattgcaggaaaaagtggctaaaggcatcagtcatgccgcattttccccgtggggtaacgcactattgctggaaaacggcgctaactggtcttattaccgcgttgataatgcctatccggatatcacctggcgcagcctgtggcagaaagtatggtacgaaaactacccggaacctgcctatgtttggcaatctacgtcggcgaatgataattaccagcctaaattcagcctgatcccgattatctttggcacgctaaaagctgcgggttacgccatgttattcgccgtgcctttggcattggccggtgcgatttatactgcgtattttatgcagtctggactgcggcgagtgattaaaccggcgattgaagttatgggagcattgcctacggtagtgattggtttgattgccggtatctggctagcgccggtgattgagcaatatctagcgggcattctcctattaccgttcttactggcgctggctattctgctgtgcggttggagcagcgcaaaactatctgagcgaattaaatggcgcctagctgccggttgggatgttgtggtgttgctgccggttattttagtcactggctggctgactttgatgctggggccgcatttggcacagtggacgctcggcttaccgctcaatgaatggctgggagataattacgatcagcgtaatgcgctggtggtcggcatagcgatgggctttgccttaattcccattattttttctctggcagaagacgcgctgtttagcgtgccgccgtccctgactcaggggtcactggccttgggtgcgacgccgtggcaaaccgtggtgagagtggttctgccttcggcctttgccggtattttttcggcgttaatgattggttttggccgggcggtgggggaaaccatgatcgtgttaatggctaccggtaatacgccaattattgacggcagcgttttccaagggctgcgcgcgctggcggcgaatatcgccatagaaatgccggaggcggtagtgggcagcggccattatcgggtgctattccttaccgctctggtgctgtttatgttcacttttgtggttaataccctggccgaagcgatacggcttcggctgcgggaacgctatcaaacggagcgggatgcgtgatgaaaagctggtttaaatcaggctcgccctggatctggctgacggccggttcggtcagcatcagcctgttggccttgctgggtatcatattgttgctggcagggcagggaatgcgttatttctggcctgcgccggtttatcagttcgagctgaaacaaagcggtgccgggctggtcagcttgatcggagaaatctatcagcagcagcagatcacacgggaacagctggcaacggcggggattcctctagcggacggacgtgattctgtgacgcgttatctgattaaaaccggtaatcgggagtttcaggggcacgattttcagaccttgcttgacagcgatattgtacagcggtgccagccgaaagatttgctggtgcttagccgtttgaatcacggtacagcctacggttttatggccgggatgctggataacgggcagccgctggtgggggataatattccgctggagctgcaaaaacggatcccgcaggtgcaggcgttggtcaggcaaggggatgatattcagttccgccagatgaacatacttaaccaacaggttgagaatttgcgtttgcaggagaaacatctgcaaaccgccggtaagctggacggacgagcgcaagatcgcctacgcgctgaacgcggagaggtacagcgtcattacgatggattggcgacaactttgcagggcctgcgcgcggaacaaaaccgctatacgctgttgctcaaagatatgcagggtcagatacacccgatttccctcagccaaatcagtaaagcttggtatcccaacaatatgactttctggcaaaaagtcaggcatatggcggggcagggacataaatttctgaccgacagtccgcgcaatgccaatagcgaaggcggcgtattcccagcgatttttggcacggtgctgatggttatattgatgtcaattatggtgatgccgtttggggttatcgccgcggtttatctccatgaatatgccaaacgcaattggttaacgcgtacaatccgcattgcggttgtgaatctggcgggcgtgccctctattgtttacggtgtctttgggctgggcttcttcgtctattttatcggcggttcgctggataagttattttatccggaggcattgcctaatccgacctttggcacgcctggcgtactgtgggcggcattaaccttggcgttactgacactgccggtagtgattgtttctaccgaagaagggttatcgcgcatacctgccagcctgcgtcaggggtcactggcgctaggagccagcaaagccgaaacgctgtggcatattgtgttgccgatggcggctccggcgatgatcaccggcctgattttggccgtggctcgtgcggcgggggaaaccgcgccgctaatgctggttggcgtggtgaaatccgtaccggtattgccggtagacggtgtattcccttttctgcatctcgaacgaaaattcatgcatttgagtttccagatatacgatatggcattccaaagtccgaacgttgaagccgcgcgtccgctggtatttgcaacggcgttactgctggttgttattgtggttgggctgaatttagccgcgatgggaatacgccatcatttacgtgaaaaataccgtggcctgatgctgtaatgacattatttaactcgcaggaaaccttatgggactgatgataccggacgccttgcccgtactggatgtacggcacctgagcgatgaaaataccgcgctggcggtagagcatctcaatctgttttatggtgaaaaacaggttttgcacgatgtttctctgcgtatccctaaaaatcgggtcactgcgcttattgggccttccggttgcggtaaatcgacgttattgcgttgttttaaccgaatgaatgacctgttggaacattgtcgaatggacggcgaaatcagaattggtgctgaaaatatcatcggaaaaaaggtcgatgttgcggcgctgcgccgtcgtgtgggtatggtgttccaacggccaaatcctttccctaaatccatttatgagaacgtggtttacggcctgcgtttgcaaggaattcgcgacagacgggttttggatgaagctctggagcgtgctttacgcgccgcggcgttatggcacgaggtgaaagatcgattgcgggagaatgctttccgtctttccagcggccagcaacagcgtttggtcattgctcgagcgattgccatcgaaccggaaattttactgttggacgagcctacttcggcgttggatcctatttcgaccttgaccatagaagagttgattacttcgttaaaacagcactataccgtggttttggtcactcataacatgcagcaggcggcgcgggtttcggattacactgcgtttatccatcaaggttgcctagtggaatacaacgataccgatggattatttacctcaccggccatgcggcggacggaagattatattaccggacgttatggctaagattcgattggttaggattatctgcgcaaaataacaccggagcccatggctccggtatagcggttaaggcgttttgatcgccggagttttatattttgtcaaatattggggttggaaaatacacatacggataaccgtgcggtattcgccgttgataaagaactcgtcgattaactcgccttcgcttttaaagcccagcttgctgtaaatgtgaatggctttttcattttctttatcaacaatcaaatacagtttatacaggttcaatacggagaaaccgtactccattgccagtttggctgcggtgcctgcataaccttggccctgatgggcgggatcaatgatgatctgaaattctgcccgacggtgaatatggttgatttccaccaattccaccagcccgacttttgtcccctgactttcgataataaaccggcgttcgctctggtcatggatatgtttatcgtacaggtcagacagttcaacaaaagcctcgtaaggctcctcaaaccaatagcgcataacgctggcattattatctaactgatgaacaaacggcaggtcatccctttccatcggacgtagcctgacgctggtagtgctagacatgcggattcctcgaaataataaataaaacagcggacgctgcgagggaattataaccacatagggcgtgggagaggagatattcctttagatgttggggtaaggtttatcatcaataatgatttgagtctctactgacggcgtaccgcgattcgttcccgctcaaacgcggctcgcttgacgaggagtgtacgagaggcgttttcagacccccatttgcgcgccaaccttgctcgggaaccgttatggcgagtgagaataaaccgaaagatttagctttcgcaacccacaccaatcttgtcgtggaaaagctcaaatacgttctttaaagtcaaaattagttcacagctgtaatcggagcaagttccggttgatattcgataagtgaataccttgttctatggtttaaactgactcattgccttgaatcaagcaataaaccgctttcctgccatcagccattgatcctgctaagctttcaatgatgctcatccatttttaactgaaaatgattggataaatacagccagtattagctgataaatctttaaggggacagaggtgattaaagctttttctcaagaaataaccaaagcggtagttgatccagtggttggtattggtattgcggagttggcgaaagggaaggcgctgaatagtttcggtacgcgtatcgcagcgggtaaaaaggtgggatgccatgcccattttcacggcgaggagtggtatatcattctggctggagaggggcgaatgtacctgggggatgtggaaaaccagaagttggtaaacttaagaaatcatgatgttaagcaaggggatatcttttgtataccgccgggaacagcccatcagttacaggctgaatcgcaactggatttaatctttttgtgcccaaatagccatctggtgacggatagaatactgttccccgatatgtgctaacccttgattaccggcggccagaaaacaacattggaacgttgggatcaaaaaagggccatatcacatggcccttttagcataaaaccggcagtagcttttattcgtcggctgcgtaaccctgtaagggcagctttttaccatccaaccaggcggcgttctcacgcatttccaatcgtccttcggtaaaccaactgaccaccaacggatagatattgtgctcctgcgcctgcactcgctcaatcacatcatcttcgctatcttcagaaaaaatgggcacttttgcctgtaagataaccggcccgccgtccagttcctcggtcacgaaatgcaccgaagtgccgtgttccgtatccccgttttcgatagcctgacggtgagtgtgcaaacccggatacttaggcagcagcgatggatggatattcagcattcgaccagcgtaatgctgtacgaattccgggctaaggatgcgcatatagccagctagcaccagcaaatccggctgataggcatcaatagcctgagccagcgctaaatcaaagctgacacggtcagggaaagttttggcatctagcgcatgagcaggaatcgcggcctgcgtcgcgcgctccagaccgtaagcctgcggattattactgaaaaccgcacaaatcgtacccgccagtcgcccttgttgctgtgcgtccatcagagcttgcagattgctgccttgaccagaaaccaaaaccacgatttttttcatagaagctaccgctatccgtctttttgttgatccgttacggattgatgacaacctgctctgctgcttctggcaatgcagcaatcgtaccgattttccatgctttttcgccggaagcggtcagcagttcaaccgccttatctgccagttcggcaggtaaggcgacaaccatacccacgccacagttaaaggtgcggtacatttcgtggcggctcacgttgccggcctgctgcaaccagctgaatactgctggccattcccaactggattcatcgattaccgcctgcgtgccttctggcagaacccgtgggatgttttcccagaagccgccgccggtcaggtgggcaatggcgtgaatctccagttgctcgatcagactaaggatagattttacatagatttttgttggttccagcaaatggtccgccagagatttgcctgccaagtgcgtttgctcaggatcggttttactgacttccagaattttacgtaccagagagtagccgttggaatgcgggccgctggcgcctaacgcaaccagtgcgtcgccgggagccactttgctgccgtcgataatttcggatttttcgacaacgccaacgcagaaaccggcaacgtcgtaatcttcgccgtggtacatgcccggcatttcagcggtttcgccgcctaccagcgcgcagccagactgtttacagccttcggcaataccggtaatcacgctggctgcggtatccacatccagttttccggtagcgaaataatcgaggaagaacagcggctctgcgccctgaacgaccaaatcgttaacgcacatcgcgactaaatctataccaatggtatcgtgacgtttcaggtccatcgccagacgcagcttggtgccaacgccgtcggtgcctgaaacaagaataggttcacggtatttttgcggtaatgcacacagggcaccaaatccacccaatccacccataacttccggacgacgagtctgttttactacgcctttaatgcgatcaacaaggtcgttgccggcatcgatatctacacctgcgtctttatagctgagagaggttttgtcggtcactgcgaggtccccacggaggttggctgtttgagctttggaagaaaacgcggcaattctaacagtctaggcaaacgtttgcgagtggcttgtgatggagtcgttgttttccatgttctagaattaagatccagtttctattgatctgaatcaggctattggttgtggcgttcaaaaaaaaaggcggtataatctcgcgatttttttggccgtcaaccgccttaataggagaaaaataatgaagatcgttgaggtgaaacacccgctggtaaaacataagcttggcctgatgcgtgaaaatgacatcagcaccaaacgcttccgtgagctggcttctgaagtgggtagtttgctgacctatgtggcgaccgccgatctggaaaccgaaaaggtcactattgatggttggaatggcccggttgaaattgaacagattaaagggaaaaaaattaccgttgtgcctattctgcgtgccggtctgggcatgatggaaggcgtgctggaaaatgttcctagcgcgcgtatcagcgttgtcggcgtgtaccgcgatgaagaaaccctgaagccggttccttatttccaaaaattggtttcgaacattgacgagcgcatggcgctggtggttgatccaatgctggcgaccggtggttctatgattgcaaccatcgatctgctgaaaaaagcgggctgccagagtattaaagtattggttctggttgctgcacctgaaggtattgctgcactggaagtcgctcatccggacgttgagctatacaccgcttccatcgatcagggattgaatgaacagggttatatcatcccaggtttgggtgatgccggtgataagatttttggtactaaatagttttaccagccgactgagaagtcggcttttttttgctccgcagcctaagaatatcaatcacctagtcagaggatagagaagatgagccgtcgcactataggggtcagcgaacgtccgccgttattgcaaacgattcccttgagttttcaacacctgttcgccatgtttggtgccaccgttttagttcctattctgtttaaaattaacccggctacggtattgctgtttaacggcgtcggtacgctgctgtatttatttatctgtaaaggtaaaattccggcctatctcggttctagctttgcgtttatttcaccggtattactgttattgccattgggctacgaagtggcgctgggcggatttattatgtgcggcgttttattttgcttggttgcaatgattgtgaaaaaagcggggactggctggctgaacgtcttattcccaccggcggcgatgggagccattgtggcggttatcgggcttgaactggcaggggttgcggccggtatggctggattgctgccagcggcaggcgcgacggcggattctacgaccatcattatttcgatggtaaccctgggtgtgactattctcggttcagtattgttccgcggcttttttgccattatcccgattctgattggcgtgctggtaggatacgcgctgtcgttcggcatgggtgtggtggatttaacgcccattcgggaagcccactggtttgccttaccgactttctatactccgcgttttgagtggtttgccattttaacgatcctaccggcggcattggtcgtgatcgccgagcatatcggccatttggtcgtgacggcgaatattgttaaaaaagatttgatccgcgatcctggtctgcatcgttcgatgtttgccaacggtatttccacggtgatctccggtttcttcggctctacgccaaacaccacatacggtgagaatatcggcgtgatggccattaccaaggtttacagcacctgggtgatcggcggcgcggcaattctggcaattatgctttcttgcgtgggcaagctggctgcggcaattcaggcggtgcctgttccagtgatgggcggcgtttccctgctgctgtacggcgtgattgccgcatccggtattcgtgtactgattgaatctaaagttgactacaacaaagcgcaaaacctgatcctgacctcggtgatcctgatcattggcgttagcggcgcgaagataaacatcggcgcgaccgagctaaaaggtatggcgttagcaacggtggtggggattggcctgagtctgctgtttaaagtctttagcctgatccagaaagatgaagaagtgattgaatctgccgaagaccaagcggcgaaatagtagctaagtgccggtgccactgagggattattcggtggtaccggccagtgatatcagggaaaggcgagattgatccctttggcgcttttttcaggatctaaatggtttttatgaagcttttgatttttgtggtaagctctctcggttttcttgcccgttttggttgaggtgcttctgaatacgccggcacagctttcactgccactttatcttcccgatgatgaaacttttgcgagtttttatccgggggagaacccatccctattagctgcgattcaggctgctgttcatcagtctcacggtagttatatctacttttggtcgcgagaaggcggcggacgtagtcatttactccatgcagcctgcgccgaactatcgcagcaaggggaagccgtcggctacgtgccgctggataagcgcgcctattttgtccctgaagtgctggatggcatggaacagttggcgctggtttgcatcgataatatcgaatgtattgctggtgacgatgagtgggaaatggcgatgtttaatctgtataaccgcattgttgaaaccggacgcactcgtttgttgatcactggcgatcggccaccgcgtcagcttaatttgcgtttgccggatctggcttctcgcctggattgggggcaaatctataagcttcagccgctctctgacgatgaaaaactccaggcgttgcaactgcgagcaaaactacgtggatttgaactaccggaagacgtgggccgttttctgttgaaacgactggatagggaaatgcgcactttgtttatgacgctggatcagttggatcgtgcctctatcactgctcagcgtaagctgacgattcctttcgtaaaagatattctcgggctgtagcgactgaacgagaatggacccgaaaggtgcccattcttgtactgaatatcgttacctatctcaatggattataaaatctcaagcacctgctccggcgggcgacccagtcgcgccttaccctgatgaataacgatcgggcgttcaatcagttttgggttattcgccaaggcttgcaacagttgcgtttgagacaggctgctatcggccagatttaacgttttatataactcatctttggtacgcattagcagtcgggcatcgctgaaacccagctgttgcagcagttctgacaacgttgcagcgcttggcggcgtatccagatacagcaccacctgtggcgtaatgcctcgttgttccagcaaagtcagagtctcacggctcttggagcagcgcgggttatggtaaatcgtgacgttgttcattattacattccttgaaaaaatcatcctaaacgcatcaggatttctggtatttacgaaaacgttcgttcaattggcgcaattggtcgatgcgagcatcgtaacgcgcctgcttcagactgcccaattttacccgtgcgctggcatcgccaagtaagccaatcgcctgtggtagtttgccactcagcgccagactttctgcccgcgcagagagttcttcatctcgcaaaccttgtgctgcagaggcttgagccagcaaatcccagccgttgggatcgttcggatgggcgaaagtgtagcgatacagaattcggctagccgccgctggctgctcgccctgtacgtaagcattggcgaggttaagctgtaagactggctcgttattttggctggcaatggctttctctaaccgggcaatcgcctgcgcgtttttattctgccccaaatcaatgtcggtcattaaatcgataaaccagatattgtttggctgttgggtcagcaatggctgcagcacattacgggcgctatcatatttcttagcctgatagaacaagattgcctgaccgtatttggccgcgagctgttcccgcgtggtgcctttgcttagcgtgtccagcaaatccgagctaaggctgtactcggtggaaccatacatccccagaatacggactttggcaaacagataatcctgtgatgaggccactgggtgcggcttcatttggctggcgcggttacgtgcgtcggagagacggctatccggcaaggggtgagtcagcagcatttccggcggtttggaggcatagcgtgattgatccgccagtttctgcataaagttcggcatggcctgcggatcgaagccggcgcgctgtaacaccacgataccgatgcggtcagcttcctgttcgttaccctgagtaaagctgatgataccctgctgggtacccgccagcgtgccgctcagccctgccataccggcctgcgggctggccatggtcaaaagtatcgaacccagtacgcccacccaggtcagcggagccattcgctgctgttcttccatcgcacgcgccaaatggcgttgagttacatgggaaatctcatgggccaacaccgatgcgagttcgctttcgttatccgtatagcgaaacagcgccgagtggagcaccacgttgccgccaaagaaggcaaaggcgttcagttgatcattattgacgataaagaagtgaaaaggggtgcgcaccgagttggcgttggccaccagtcggtttcccaactgattgatatattgagtcagtagtggatcggcgatcagcggcgtgctggcacgcatctggcggacgtaaaaatcgcccatcgccaactcctgattaatactgagagtgccgccggcggtggtgccgatatccggtaacagatcctgcggcgtttcggcagaaacgggcgcgatcccagaatagagcagggtagtgagcaatgtggcgatcactgttttacttaacagacgtgtcataaacgagactgcccctactgaggtaatgacgattttgacgcctgtgatgcgtaagagttcttcttccctgctctgctctccagtacaatcatcacgaacgcgtgttggatcacaaataagcgatcagaaatctcaaaagctctgtccttggctttgtgtcgagattgtctgttatcttagctagctcaccagcacaatggaacttttgcctagcaatattcttagttttactcattaatgctctcccctgtgcttaaagggccgcaaaagaaacctgtatttcgcaggttcgtcatggttttcaaggagcaatctctgatgttagagatgttattacagtggtatcgccgacgttttactgacccacaagtcattgcattgctggttattttactggccggattctgcattctttattttttcagcggcattttagctccgctgctggtggctattgtgttggcgtatttgctggagtggccaacggctcgtttgcaacgcatcggctgttcgcgactgtgggcggccagtatagtgctgattttgtttggcggtatcgccatgctgttggtgttggtggttgcgccgaccgcgtggcagcaagggattaatctgatttcggatatgccgaaaatgttgaatcaattcaatgcgtacgctcagaccctaccgtcacgctacccggcactggtggatgctggcatcgtggatatgatggcggaaaatatgcgcggtaagctttccggcatgggagactcggtcgttaaattctcgctggcttcgatagttggcctgctgacattggctatctatctgattttagtgccgctgatgctgtttttcctgcttaaagataaagaacagatgctgaatgcggtgcgccgggtattgccacgtaaccgtggcctggcggggcaggtatggaaagagatgaaccaacagattaccaattatattcgcggcaaagtgatggaaatggtgattgtgggtattgctacctatctggtgttctttatcctggatatgcgctacgcgctgctgttatcggttttggtgggtttctcggtgctgattccctatattggcgcggtgattgtcactattcctgtggtgctggtggcgctgttccaatggggtatcggtgccgatttctggacgctcatcgtggcctatctggtggttcaggggctggatggcaacctgctggtgccaattttgttctcggaagcggtgaatctgcatccgttggtcattattctgtccgtgattattttcggcggaatgtgggggttttggggcgtattcttcgcgattcctttagcgacgctggtgaaagcggtgattcatgcctggccagaagagtttattcctgacgctgattaatgtcggcgaatacccaatattacccataaaaaagagcgcctgggcgctcttttactttatctgaatcctatttgttggcagacaaatcaggcattttgctgtaggtaagccatcacgatatcgtggtgattggtggttttgaagttatcgaacacgtgttcgaccttaccttcgctgtcaatcaggaaactgatgcgatggatgccgtcataggttttccccatgaagctcttttcgccccacacgccaaactgttcagcaacctgatgatcttcatcagaaagcaaagtgaagttcagcaactctttttctgcaaagcgagaaagtttctcgggtttatcggtactgatacctagcacttctacaccggcgtttttcaatgtatccatgttgtcacgcaggccacaggcctggacggtgcaacccggcgtcatcgctttcgggtagaaataaaccaatacgcgttgtccaaggaagtcggccaaactaatttgctcaccgtcttgatcgggcaaactgaattttggcgcaatatcaccggctttcaatgggctcattactaactctccattcggtcgtcatgctgtgggtagttcacaacgctaatactgccctgcgcattgagttctgtacatagctgatgaaaagcttgttcaataatagaactgttttggctggcagggctgtgggcgctgatctgaatatgtagcaaaggcgaattattgccctctgccggctgggtttttgagaccagttccgcaatgttcatattgtgacaatggaacaggttagtgaatcgctcaataatatgtggggaatctttaacttcaacctttacccagacggtagcaggcatggcttgctgatcctgcgcgttagtgcgtttcatcacaatcagtaaatccagctcggcccctttctgcggcaaagtggactcaatcagagtgatggcgttccaactaccggagagcaacatgatgaatgtgaactcttcaccgaacatcgccaagcggctatcttcaatattacaaccgcaactgctcacatggcgggtgatagtgtttacgatacctgggcggtctgcacccagtgcggttatgaccagataatgttcatcaagctgcggcaaagtcgctcttcctgtgtcgctctatggggttaccatggtaaacataaaaaaaacctgctgccaagcgcttacaacacagttgtttacttgcttttggatagaggtcaaaagtaccatgaggaacttgtttgtggaggagatggccgatgtttacgggaagtatagttgcgctggtaacgccgatggacgacaaaggtgctgtcgatcgtgcgagccttaaaaaactgattgattatcatgtggccagtggaactgccgctattgtctccgtcggcacgacgggtgagtctgcaacgttgaatcacgacgagcatgcggatgtggtgatgatgactttggatctggccgatggccgtattccggtcattgcaggaaccggcgcaaatgctacctcggaagccatttctcttactaaacgttttaacaatacgggcgtcgttggctgtttgaccgttacgccgtattataatcgtccaatgcaggaaggtttgttccagcattttaaagctattgctgaaagtaccgatttgccgcagattctctataatgtgccttcgcgtaccggttgcgatatgttgccggaaacggttgcacgtttagctaaaattaagaatattgttgcgataaaagaagccacggggaacttatcgcgggtaagtcagatccaagtgctggttgatgatgaagatttcatcctgctaggcggcgacgatgccagtgggctggactttatgcaactgggtggtaaaggcgttatctcggtgactgcgaacgtagcagcccgtgaaatggcacagctttgtgccctggcggccgcaggcgatttcgctgaagcacgccgtttaaatcaacgcttgatgccgttgcatcagcatttatttgtagaagcaaatccaattccggtgaaatgggcctgtaaggcgctggggttgatggcaaatgacactctgcgtctgccgatgacgccgctgactgaccctgccaagctggtagtggaaaaagcgttgaaaagcgccggtttgctgtaactcttagggaaatttgatggcaatatcattgcaaaagtcgatggtggcaaaggttgtgggtgtttcgttggtcatgctgctggcagcttgtacaacggatcaacgctataaacgtcaggttagcggagatgaagcctatctcgatgcgccggcgctcaagccgcttaacgcacctgctggtatgattctgccgttgcaaaacggtgattttgatattcgtgaagttcgttctactggcaacgtcggcaaggctctggacattcgtcctccggtgcagccgttggcgctgttgagcggttcgcgcacggaatatactagcgataccagcaagctgttgttagaaagtagcccgcagaatcgtaacctttggagccaggtcacccgcgtgattcaggataagaatctgccggttgccagccgtcaggatgcgaatcaaacgctgactaccgactggatcaagtggagccgcggcgatgaagacgtgcagttcgaaggccgctatcaggtgagcgtcgtagagcagggttatcagttgtcgctggtggtgaaatcactggaactgcagcagggggggaaacccgtcaccgaatatagcgctattcagcgttataacggcgcaatgctgaacaccattattgaaggtctggataaagtccgtaccgacgctgaaaacaatcaggccgctcgcaaagtgggttctctggatgttcaaagcggcagtgacgataccggcttgccgaacctgatcgtccgtgtaccttacgccacgctgtgggaacgtctaccagctgcgctggagaaaatgggcatgaaagtgagcgaccgcagccgtccacagggtaccgtggccgtgacctacaaatctatgagcagcagtagctgggatgcgttgggtgcgaaagatccggagctgaaagaaggcgattacaaacttcaggtcggcgatcttgataaccgcagcagcttgcagtttattgatcctaagggccataccttaagccaatcgcagaacgatgcgttggtggcggtgttgcaggccgcgttcagccagacgagcgcaaactaaacaaaggggcttcggccccttttgtctttgtgtttattagctatatcgggcggtgctggaacgatgcggcgcggctctgtaggtaaagttaattttgttaacattcgttttgttaatgccagttttgtcaacatagtcattctttatcaaagattgtcacactattggagtaataagatgcaaaagctagctgagttgtatcgtgggaaggcgaagaccgtctataccaccgaaaatcctgacctgttggtactggagttccgtaacgatacgtcagcactggatggtcagcgcattgagcagttcgatcgtaaaggcatggtcaacaacaagtttaaccatttcattatgaccaaactgcaagaagccggtatcccgacccaaatggagcgcctgctttctgataccgaagtgttggtgaaaaagttggatatgattcccgtagaatgcgtgattcgtaaccgtgccgccggttctttggttaagcgtctgggcattgaagaaggtctggaactgaacccgccgctgtatgatttgtttctgaaaaacgatgccatgcatgacccaatggtcaatgaatcttactgtgcaacctttggctgggctagcgaagcgcatttggctcgtatgaaagaattgagctacaaagcgaacgacgtactgagcaaaatctttgacgacgccggtctgattttggtggacttcaaacttgagttcggtttgttcaacggcgaagtggtgttgggcgacgagttctctccggatggcagccgcctgtgggacaagaaaaccctgaataagatggacaaagaccgttaccgtcaaagtctgggtggtttgattgaagcctacgaggaagttgcgcaccgtatcggcgttaaattagactaaccgcgcaatcgattacgttgtttttccaatctcgttaatcaggggagagcgttcgtttctcccctctatttctgtgtttttgattaaaatcctgccatttctttcttacgacactatttttaatggtattcatccatatgattttctacgatgagtggaaagtctgttctggagtaaagctatgcgttggcaaggtcgtcgtgaaagtgacaatgtggaagatcgtcggggagcttcatctggtggcggcggtggttttcgcccaccgattggaggcaggggcgggctggtaatcctgattgtggtgctggtagccggttattacggtgtggatctcacgccgttgctcaacggcagcgatccgacgcagcaaaccaaccagcaatccagtgcgccaattagcccgaaagatgagcaaatggccaagtttaccaaggttgtgctggccgataccgaagatacctggaaacctattttccagaagatgggcaaaacctatcaggatccgaaactggtgatgtatcgcggcgcaacgcgtaccggttgcggtactgggcaatcggttatggggccattctattgcccggcggacagcaccgtatatatcgacttatcgttctacgaagagatgaaaaataagctgggtgctggcggtgattttgctcaggcttatgttattgctcatgaagtagggcatcacgttcaacatttgttagggattgatgccaaagtacgccagcaacagcagggagcctctcaggttgaagctaaccgcctttccgtgaagatggaactccaggccgattgttttgccggcgtgtggggcaaagcgatggatgagcaacaggtactggaagagggtgatttacaggaagctctcaatgctgcgcaggccatcggcgacgatcgtcttcagcaaaagagtcaggggcgagttgtgccggatagctttacccacggcacatcccagcaacgttacacttggttcaagcgcggttttgacagcggtgacccaaacagttgtaacactttcgccagccgctaaaatacttcatcgctgcgtgacagcatgattctccgatccttgccggcgcattagcgaccggcatttgttttttgaatattttactttttgactacattgcactttgactaaaaggtagggatgaccatggctacactcgatcctacattgctaatcctgctgggattggctgcgttgggtattatcagtcacaacatgacggtaacgctggcgattttaaccttgctggccatccgtattacgccgttgaaccagtattttccgctagtggaaaaatacggtttaaccatagggatactgattctgactattggtgtgatgacgcctatcgccagcggacgaattagcgccagcgaggtacttaactcctttgttcactggaaatcgattctggcgatagctgtcggtatcggagtgtcctggctgggtgggcgcggggtgtctttgatgacgcatcagccttcggtagtcgccggactattagtcggcacagtattgggcgtagcgctgtttaaaggtgtgccggttggcccgttaatcgccgctggcttgctgtcactggttatcggtaaacaataacgtgattgacactctggttgccttacagccgcagatggtgcagcagggcatacgccgtttggtggtattgagcggttgcgctgactggagccgccaacaggcgaaagcgctgtatcagcgattaggcagtggcgtttggctggctgaacaggggccggattccgctgaaatgattgctccattatcggcaaaaaccttattgggacaggagcgcctgcacggctttttcgatgctacccaagggttgaatatcgatgcgttggcgattttggctggaacgttgcaggcgggaagctggttggttttgctggtgccagagtgggaaaactggccaatgcagccggatgaagacagcctgcgctggagcgagcttacgcagccgattgccacgccgaatttcattcgtcatttgcaacggcatatgttggctgatgcggaaaccatagtgtggcggcaacatcaggtggctcaaccgccgcagtttgccaagcgtgcaacctggcaaccggcaacgggcgcgcctactcaagagcagcgggcgattttgtatgcgctgttgcgttctgaggctgatatttgggttgtgaccgcgcctcgtggccgtggcaaatcgacgctggctggaatgctggtaaaccagtggccaggtgcctgttgggttacggggccgactcggtcagccactgaaatactcaatcactgcggcgatagaaaagcacaattctgggctccggatgcattattgcaacaccttgaaactgaagccaatcatgacgcagactggctgattgtcgatgaggccgctgcgatcccgacgccgcagctatccgccatgttagttcatttcccacgtgtattattgatcagtaccgtacagggttatgaaggtactggacgtggatttttgctgaagttctgcgcgtcgttacctcactggcaaggtttcactttaaaagatcctattcgttgggcaaataacgatccgttagaaaattgtttggaccgcgcgttgctgtttaccgatccgatcgccactgactcagccggtttggtaacgatccgtcgttgccagcagcaggattggctcaacgatcccgatcttttagccgagttttatggtttgttatgtagcgctcattaccgaacttctccgctggatttacgacgtttgatggacgcgccgggaatgcatttttccgctgcggtgagtgctgggcaggtgattggcgcgttatggttggtggatgaaggtggattaacggcggaattagcttgggaagtttgggcgggacggcgtaggccgcgaggcagcttggtagcgcagtctctggcggctcacggaggactgtggtgggcgccgacgctgcgttctcgtcgggtgagtcgggttgcagtgctggcgcaacggcggcgtgagggcattgcgcgacaaattatcgctgaagaaactcggcgggcaaaagatcaaggtgtggattttctctccgtcagttttggttttaccgaggatttatggcaattctggcagtcctgcggttttgaactggtgagaatcggtagccataaagaggcaagcagcggttgctacgcagcaatgggaattttaccgttaacatctgacgcggtagcactatgtttggcggcaaaggagcaactggctcgcgactggcgctggttgcgtcgttggatagatttgacgttgcctttccccgattgcgcagatacggctctcgatgaaaatgactggcaggaactggctggatttgcctttggtttccgcccgatagaagccagtctggcggcgttgaaccgattgttactgcacagtattttgccgctaccggcattgcgacaatatttacaggaaggggtgtctactgcggagattagccaaaacctgaaacttagcggacgaaaagcgctggttgcccgttggcgggaagaaactgcgcttggattgagtgaatgggatgtggcgttgacgggtcggtggcaggaaagggtaaagggggagtaggttttgatcttagtccggcgagccagagctagattcacctgcgggcgttatcagagcgccatgccattcccatcattgcaataaatggaataactcattcaagaaaacccgatattcatctcgtcgcagcggcgtatagtatttctatcgctacctgaatacaggggcaccttttcggctccgtagagccagtatttattgaattaaggagtatcctatgaaccacgagcatttcgttgtacaaagccccgcgacaccggctgagcagctgattttgctctttcacggtgtaggagataatccagtcaatatggggcagatcggcagctattttgctaaagaattcccgcaggcgctggtggtcagtatcggcggacctttcgccagcggcctggttaatggacgccaatggttttccgtgcagggtataacggaagataaccggcaggcacgtattgatgaagttttaccgcagtttgtcgcggtggtacgccactggcagcaacaaagcggactgggcgcgcaggccacggcgctggtcggtttttctcaagggtcaattatgtccctcgaagcggttaaagcggaacctcaactggctgggagagtagtggcatttagtggacgttttgctaccttgccggagcaggcgccaaaagatacggttatccatctgattcacggcgaagatgacaatgttatcaacgttgaacaaagtaaagcggcggcgactcgtttagccactttaggcgcagatgtcacgctagatttggaggaagataatggccatgcgattaatcagggcatgatggattccgcactggaacgcctgcgttactatgtgccccagcattattgggatgaggctttgtccggtaaacgcggtgaactcatcgctttccgataagctgccaaaaaaatagggcaagcgtctgagaatatcgcgcttgcccttttttatgcttaataatcagaacgctagctgttttatcctatataaagaatgatcgcaggctactttttgttcttattatccggccagtcatcgtcgtcgtcccattgagcattattatctcggtgtggcggtaactccggcttattgctcaaaaacttcttatggtcgagccgacgcagctctttgatcccattcaaaataatccctaccagcaggatcagtacaatccaccagtaatctgctaaccattgcatgggcgcactcctttggttgtcgatatgaaacgcgagaataccagtggtaaatggctggcaagccactcaataccggcaacgtcctgttgttgccaggcttcaagcagcagttctggcgtgagtaaatgctcagcctggtccgccaatggtcggtagcttaaatgccatggctctaccgctacgccgccgctgtcttcaacgaaggggcgatagaagccaaaattggccatattggcgctaagccattgggttaaagaataaaaatatccgccagcttcatattcccaaggctctaactgtagtttttccccttcgggcagcagggtcggatcgtaaatatccaaatcgctgccccagtgatgacgactggcacccggtaatgctgaccagcgcagaatggcctcacagcgttcgcccgcactcattcctgaaatatccagcggctggctgttgtgatctaatactggccgctcaccgcggaatttaccattccagattgctaattgtcgttcaaaatcccgaaaggtactagcgggttgcagattcagaccagcgtctttagccgcctgctgcatagcgagaaacgcttttacggcctgaggttgcagacggtgattcccactgagcggaaccagatgctcacaggttttgccggtcagcatttccggggtcatcatgcgatcaattgttccataatgcgttgatacatgcggctaagtaactgcaaatcagccgcgttaacgcattcatttactttgtgaatagtggcgttaaccgggcctagttcaaccacctgtgcgcccatcagtgcgataaaacgcccatcggaggtgccgccggtggtcaatagttgaggcgtcacctcattatacaactctaccgcgttcaccaccgcatccactaaagctccgcgtgcggtcaggaacggctgaccggaaagcacccaatcgatgctgtaattgagttgatggcgctccagcaaagcttcgacacgctgccggatgagcgcatcggtcaattcggtgctgaaacggaagttaaactgaacgtaaagttcgcctgggataacgttgttgctgccggttcccgcttgcacgttggcaatttgcatactggtcgccgggaagaattcgttgccttcatcccattgagtggtaaccagttcctgcaatgcaggcatcgcgcgatgcaccggattatccgccagatgaggataagcgacgtgaccttgaacgccatgaatacgcagattggcggtgattgacccgcggcggccatttttcaccacgtcaccgacgcgttcagtgctggatggttcaccaaccagacaatagtccagccgctcgttacgtgccatcagcgtgttgaccactttcaccgtgccgttaatcgccttcgcttcttcatcggaggtgatcataaaggccagacgccctttatgattcggattagcggcgacgaaacgctcagcggccactaccattgcggcgagtgaacctttcatgtcggcagcaccacggccataaagcataccgtcccgaatgaccggatcgaacggcggattagtccaatggctttcatcgccggtgggcaccacatcggtatggccggcaaaagccagggtttcgccttcaccgcgccacgcccagaaatttagcgtatcgccaaaattcatcggttcgacggtaaaaccaatcgcctgtaggcgctggatcatcatctcctgacaaccggcatcttctgggctgagagaggggcgacggattaactgttgggcaagttcaataacggggcagctcatcttaacgcacctctgcaaaaaactgttgatagctctcaggtttgaaaccgagcaaaatgccgccgtttgccgcttccagcaccgggcgtttaatgattgccggttgttccagcattagagccttggcggtatgcgcatcgaccacggcggcgcgctgcgcttcatccagtttacgccaggtggtgccgcgagtattcagcagggattcccagcctaaatgttcgataaaaccttgcaaaagcgtatcggttaatccgtcaacgcggtaatcgtgaaacctatagggaatcgcgttgtcttccagccagcggcgggcctttttaatcgtgtcgcaatttttaatgccatagaggctaattgggggattttccgggctatctgacataaataacaatggcctctacaaaattatgggcaaatgagtgcgggtaaacccaaaagttgtatggaacctcggatttaggctacatcacataatgcggcaaaatgccctgtgaatccagacggctattgtcgtattccctcaatggggtatttcgcgcaggttgagccggagagggttgccatttcagtttatgtcctgataacgtagatccttatttcggtgcttgtttagatagggatattaatatgcagggaatattacgcttttgtgtttttttcggatgttgtatgacgatgtttacagccagtgctgccgggccagatggcgtattttcgctgattgatcagcgtttatcttatatgaaagatgtcgcgggctataaggccgcccatcatctgcctattgaagatttagcgcaggaaaaacgggtattgcagcaggtgatggatgaggctgaaagaaaggggattgatcctgaatcgattaaacccttctttatcgcttcgatggatgcggctaaggcgattcaatatcgttatcgggccgagtggttatctaaaccggcaaagggatgggaactacgcagcctagataaaatccggcctgaaatcgccaatttaagtaagcaattgatcgcagaaatttattcgctactggcttccggtcaaaccattgaacagagcgaacggccacgttttatggatatcgtgcatcagatgaatttgaatgataatgataaaatgcgtttattctcaactctacggttaattaaactgagtcagaaataatgcaattgccaccccgttgcgggtggcgtttcttagattagccatttattctctgcatcagccaatccgatccaagtctgctgcgtactgtcgaattgcccgttgatataggctgatttctttatggttagaggtttctgccagaagcaatagcaatgaggcgacagcgtctttggtttcgcccagattatataacgtcatggcgcgaaatagcgttatctctttggcatcagggaattgcgttaatgccttttcgaatacatccagcgattctttatatagacccagagtacggtaggtactgcctaatcccagataaactgcctgtaattcttctgcgcccagatggttgtcaatggcggtcagataaaatggaatcgcctgcatttctaaaccctgaacgtcgtacaacgaggcaattttatgcagcaggctaccgttatggggatcttcaaccagtaatttgaatgccaaagtcatggcatcgtcataacggcccagtttttccagagaatctatggtgtgtttcatggcatatggcgcgttaatgtgagaataacccgcacgctactctgtcgggctgaaacaggcaagcctgcatgtgtaataacctgagttatttcaatatctccgccaacgaaattatatcctaaatgattagtctattatttcgcctttatttgttcgaaaactaatcgtataatcacggcggttattagagaggacattatggttgatgtagagttaaacacatggaaagagtttatcgagtcaatgctgagtaaggcataattcgataaatgagtaatagcggttgatgctattttgtatgacttagatttacccagggagcgagtgactcgctcgcaaaaaggcaggttctcaaagaatctgccttttttatttgggtcacggcacgtttgatatgaaagctattttagatgtcgtcaatattattcacgttatccgatgaataacttatcaaataacaataactttttagtcgacattaataatgtggttttctccgctgaatgtattacttcctctatttattaggaaataatttagcaggggattgttaaggaaaatttaatattgattaatcattcactcatacaatatcgttatttttttctgaagatgtggcgccaatcaattcactgaaatagtgaacgattggcgcaatcattgtgaatgaataaagaattagtgctcatcagcctgattaggctggctcccacgaatcggccttcccgggaaacgacggcgaaccaaaacaaagaataatggcacgaagaagatggctagaaccgtcgctgaaatcatgccgcccatgacgccggtacccacagcgtgctggctgccagagcctgcgccctgactgatagccataggcaatacgccgaagataaaggccaatgaagtcatcaaaataggtctgaggcgttgacgcgaggcctccagcgtggcttgaaccagatctttgcctttgttatttaattcattggcaaactcgactattaaaatggcgtttttggccgatagcccgatgatagtcaacaatccgacctggaaatacacatcgttttccagcccgcgcatccaggtcgccgcgacggcaccaatcacccccaaaggcactaccagcataacggagaacggaatagaccagctctcatacagcgctgccagacacaggaacaccactaataacgagatagcgtaaagcgccggagcctgtgaaccggacaggcgttcctgataggacatgcctgtccattccagcccgaaaccattcggtaactggctcaccagcttttccatgatgtccattgcagcaccggtactgacgccttgggcggcttccccgacaatttccagtgcggaataaccgttgtaacgctcgagacgcggcgagccaaattcccagcgggtagtggcaaaggcagagaaaggcaccatgccgccgctattattccggacataccacttattgatgtcttccggcagcattcgagcggtagcttccgcctgaacgtaaactttcttcacccgtccgcggtcgacaaagtcattcacataagttgagccccaggcggttttcagcgtgttattaatatcatccagcgatacgcccagtgcctgagccttgcgttgatcgatatcgatttgcagctgcgggctgtcgtccagaccgttatgacgaactcgcgtcagctctggctgtttggccgctagctgtaacagttcatcccgcgcggccattaatttatcgtgcccctgaccgccgtggtcctgcaattccagatcaaagccagaggagttgcccagacctgaaattgctgagggactactggctgaaaccttggcttcagtaattttgttaaaagcctgggttgcccgctcaataatggcaaaagaagaatcctgactgttggatcgctgatcccagcttttcaaacggacaaacaggcgagcaacgttttgcccgttaccgccggggcctgaacccacggtagaaaacaccgatagcacgttatttttttcttccgtcaggaggtaattctccactttttccactactttcagcgtttgttgctgagtggaaccgacgggtaactgaacctgagccataaatacgccgcggtcttcctgcggtaaaaacgaagtcggtaacttgaggaataaaaacgccaggccgccgagtaagagtaaataaaccaggatatagcgcaggctatgatgtaaaacccgagcgacgccgttttcatagcgtttcgcattgcggtcaaacatacggttaaaccagccaaagaatccacgtttaccgtgatgatgcccggctacgaccggtttgagtaaggtggcgcacagcgctggcgtcaggatgagagcgactaaaaccgacagaaccatggcagaaacgatagtaatagagaactgacggtaaatcgcgccggtcgtgccgccaaagaaggccatagggataaataccgctgaaagcaccagtgcgataccgactaacgccccttgtatctgccccatagatttccgtgtggcttctcttggtggcaatccttcttcgctcatgacgcgttcgacgttttccaccaccacgatggcgtcatctaccaacagcccaatggctaataccacggcaaaaagggtgagggtgttaatgctaaacccgaaagccgacaaaatggcgaacgtccccaataacactaccggaacggcgatggtcggaattaaagtagcacggaaattttgtaaaaacagatacataaccagaaacaccaatagcaccgcttcaaccagggttttgactacgtctttgattgaggcttgtacgaaaggggtagtttcgtaagcgattttggcttccagcccgtgggggaagaacggagccagttcggcaatacgcgctttcacgagcttatcggtttgtaattcattggcaccagaggccagtttgatacccattcctgacgcgggctgcccgttaaaccggctgagataatcatatttctctgcacccagctcaacttttgcgacatcgcctaaggtcaccaatgagccgtcttgattcacccgtagggtaatttcacggaactgttctggggtttgcaattgggattgagcgttcatggtggcattcagtgcttgattatccaccgaaggcgtaccgccaagctgcccgacggcaatctgactgttctgggatttgatggcatccacgacatcctgagtggttaatcggtagttagttagcttggaaggatcgagccaaatgcgcatagcatattgggaaccaaaggcatccacgctgccgacgccttcaatacggctgattggatcttgcaggttactggccacataatcggcaatatcctgtttatccatgctgccgtcggtagagacaaacgcgagcatcatcagggtattatcaccagatttagagacgttaaccccttgttgctggacatcctgcggtaactttttaaccgcagactgtaactggttctgcacctgctgcatggcttcatttggatcggtgccggcctggaaagtcagcgtgacgctggcactcccggcattactgctctgggaggacatatacagcaggttgtccaggcctgtcatgctctgttcgattacctgagtgacggtgttttcgagcgtttgagccgacgcacccggataactggcagaaatccgcacatttggcggagccagattaggatactgttcgacgggtaaagagaaaatggccaacatcccggtcaggcagagaattatcgctaacacccatgcaaaaatggggcgatcgatgaagaaatttgccatgtagcgggaacctcgttaagcgtgaccttatcactggaataggaaaaatattacttttgtgaatctgtcgctactttacgtgtgaatcagtgatgaaacgtggagaaaaaaaggagatagtgtaaaaaaacacaaggtcgcttttttttgctgccttattgctcataactcgcgatatccagaggttatttctcatcgcgcagattgatgtccggcggtttggcgtcgaacagcaatgtcgcctgagaacgtccttgaaccaaaatagtatctttaaacaggatataactatggaactcaatccggtattcgcccggcgactttatctgtgctggttacttagtgtaagtgataagcccaatgtgccgcgattaatggcgttaaccggctggccgcggcgcaccttgcaggacgtgttgaaagccttgccggggctgggcgtcactttaacctttgttcaggacgggataagaaataatgacggtttttactgcctggaaagctgggggccgctgaataaaaagtgggtgctggagcaccataaagtcattttagcggccatagagtagccccggttgaccggggttagtctcagtggcgcttgttttccagatacaaaatggtggcggcgacccgtgaacgcacattcagtttacgtaacaggttacgaatatgaactttcaccgtttcttcggaaatatgtagctcgaaagctacctgtttattggacatgccgcgcgcaacttcctgaagaacatccaattcacgctcggttagttctgcaaagggattaatctgttcgtggcgagaggagagatactcttgcacttcttcgctgaacacgctttctccctgagcggcctgccgcaaatgctccagcagaatttctggctcgctgtcttttaacaggtatccgtcggcgccggcgtcaatcatggcgtacacgtcgctgcgggcgtccgaaacggttaatacgataattctggcgccaatgccgtcgttacgtaacgctttcagcgtgtctaagccgttcattcccttcatattcaaatcgagcaaaataacgtcgggtagagtttgactggccaattccaatgcttcttcgccgttattggcttcggcgactacggtaaatgccgtttccagttctaacagctgcctgatgccgcgacgcattaacggatggtcgtcaacaatcataatggtgtgatttgtcgtcatgataggtaatgctccctgtagccagtaaaacgtaccgcaacaggcaaggttatgccgattccggtagcaagattatggtggaattacgtggtgatagccgaaaaacctttagccaacctaaagtggattctttttattgcgtaacctggaacccattacgctccgttaaaacggtacgatccgctatttattgtaccgcaaccgccctgaatattataaacctgttctgctttaattcatgatttctgtctatataacacggtaaaacggttattaggtgattaattttatatgcatacagttatgcgaattatttaataaataagatcaccttgattattctatttgataaataaaataatcatgaaaatactgatcgtgctcatcttggcttaatcttgattcagccgttagttaaatcgttatgtaaaaatataaataacgcaaatcggttaaagcaggagggaaaggacaaataacgctggaaataattgatctggcgcaatctttccctctgattaactctaaagggtaattatgtttttaccaataattgggtatctactgttaccaaactagggaaaccatttagtggtaatacgaataataataattatcaccattttgattttccggccagagcagccgggtcctatttgctaaaccacataataatctggaagcaattaggtatttaaataaatggcaagcagtgttgccagcaatgtcaagggtatcagtatggccgatttgtcccgacgccgattgctttcagggcattggcggcgcaatgctgaccattcgtcttccgttatccggccgccctggtcggttgccgaagctgagttcacggctggctgcacgcgctgccacgcttgtatccacgcctgcgaaaccggagtgcttattgccggccgcggggggttccccgagatagatttccaacgtgccgaatgtactttttgtactcattgcgtaaccgcctgcgaggcaccggtttttacctcgccggatcgcgaaccgtggcagttgaaagccacattctcggcaagttgtctgccttttaaaggcatcgaatgccgtagctgtcaggatagctgcgaaagccgggcgatcggattccgcccgcgtttaaacggcattgcccaaccagaattagagatcgacgcctgcaacggatgcggagcctgtgtgcccggatgtccggtacaggccgtgactcttacccggagcgaagatggaagataaagaatggcatgtttgcggtctggtggtgcaagccaaaccggaacgcattccccggttaatcgacgagttactcgcgattccgggaacagaaatacccaccagtgacgcccaacagggaaaactggtggtggttatgcaggcagcgcgctcagacgtgctcctgagacaaattgagtcagcgcgtaatttgaccggcgtgctggttgtgtcgctggtatatcaccagcaggatgagcaaggtgaggaacaaccatgaaactcagtcgtcgggacttcatgaaagccaatgccgcagtggccgccgccgccgctgcggggatgaccatacccaccgtggccaaagccgtggtgggtggtgcagatacgattaaatgggacaaagcaccttgccgattctgtggtaccggctgcggtgtactggtggggacgcaaaatggccgtatcgtggcgtcgcagggcgatccggattcacccgtcaaccgtgggctgaactgtattaaagggtatttcctgccgaaaatcatgtacggcaaagaccgtttgacccagccgctgctgcgtatgaaagatggccagtacgataaagaaggcgagtttactccggtaagctgggaaaaagccttcgatatcatggagctaaaatttaaaaatgcgctgaaagaaaaaggccctaccgccgtgggaatgttcggctccggccagtggacaatctgggaaggctacgccgcgtctaagttaatgaaagccggtttccgctcgaataacctcgatcctaacgctcgtcactgcatggcatcgtccgtagtgggttttatgcgtacttttggtatggatgagccaatggggtgctatgacgacattgagcaggccgatgcattcgtgctgtggggctcgaatatggcggaaatgcaccccattctgtggtcgcggatgactagccgtcgtttaaccgatcctaatgttaaaattgccgtcctttcgaccttcgaacatcgtagctttgagctggctgacaatccgattgtcttcacgcctcaaaccgatctggtgatgatgaattacattgccaattatattattcaaaataacgcggtagatcaggatttcctcgatcgtcacgttaatttccgtcgcggtgccaccgatatcggctacggtttacgtccgactcatccactggaaaaagcggcgaaaaatccaggcagcgacgcgtcggagccgatgagttttgaagacttcaaagccttcgtggcggaatatacgctggaaaaaacctctaaaatgagcggcgtgccggaagatcaactggaagcgctggcgcagctgtatgccagtccaaaagtgaaagtggtttcctactggaccatgggctttaaccagcatacccgtggcgtgtgggcgaataacatgtgctacaacctgcacctgttaaccgggaaaatctccaagccgggctgcgggccgttctctctcaccggccagccttccgcctgcggcactgctcgtgaagtgggcactttctctcaccgtttaccggccgacatggtggtgaccaacgagaaacatcgccaaattgctgaaaccaagtggcaactgccagccggtacgatcccagagaaagtcggtttgcacgccgtggctcaggatcgcgcgctgaaagacggcactcttaatgcgtattgggtgatgtgtaataacaatatgcaggccgggccgaatatcaacgaagaacgtatgccgggctggcgtgatccacgtaactttatcgtggtttccgatccttatccgaccatcagcgcgctggccgcagacctgattttgccgacgtcaatgtgggtagaaaaagagggcgcatacggtaacgctgagcgtcgtacccagttctggcgccagcaggtgccatcaccgggtgaggccaaatccgacctgtggcaaatggttgagttttccaaacgtttcaaagtggaagaagtatggcctgctcaattgttggatcagaaaccggagtatcgcggtaaaacgctgtttgacgtgctgtacgccaacaacgtggtgaataaattcccattaagcgaaattccggctgatcagttgaacgatgaagcgcgtgattttggtttctatatccagaaagggctgttcgaagagtatgccgattttggtcgcggccacggtcacgatttggcacctttcgatcgctatcatcaggagcgaggtctgcgctggccggtggtggacggcaaggaaaccctgtggcgctaccgggaaggtttcgatcctttcgtaaaagccggagaaagcgtgcgcttctacggtaaacctgatggcaaagcggtgatttttgcgctgccttatgagccagcggcagaaagtcctgatgaagaatataacctgtggctgtcaacgggtcgcgtgctggagcactggcacaccggttctatgacgcgtcgggttccggagctgcatcgtgctttccctgaagcggtgctgtttattcacccgctggatgcgcgagcgcgggatctacgccgaggggacaaagtgaaagtcatttcccgacgtggtgaagtgatttctctggtggaaacccgtggccgtaaccgtccgccgcaaggattggtgtttatgccgttcttcgatgcggcgcagttggtcaataacctgaccttggatgccaccgatccgttatccaaagaaaccgactttaaaaaatgcgcggtgaaattggaaaaggtttaaccctgatacccagcctgctgtcggagccgttttaaggcacgcaggccgatttagggaaagatgaagtgtctttcgggagccaaataatgaacaacaaaatgtttaagtcgtttagccgctggttggtgctagtggcactgattttgggcggagcggcttatgccgccagcaatgtcgaaatggatttgagccaatcgccggaggtgtccggaactcaggaaggcaaggtaaaaatgcctaaacaacaacagcgtatggcgctgaactatgttaaccaaccaccgatgattcctcacagcgtggagggttatcaggtcagcaaaaacaccaatcgctgcttacaatgtcacggcgtggaacattatcgcaccaccggtgcaccgcgcgtcagtccgacccactttatcgatcgtgatggaaaagtatcgagcgaagtttcgccgcgtcgatatttctgcctgcaatgccatgtgccgcaaacggacgcggcgcccattgtagaaaacaccttccagcctgcaccgggctttggtaaataaccgaggtagttatgacagaggaaaaaaaaccgggtgtgatccggcggttatggcagtggtggcgcaggccgagccgattggcgctagggacgttactgctgatcggttttgttgctgggattattttctggggtggtttcaacaccggaatggaaatggctaacaccgaaaagttctgtatcagttgtcatgaaatgaaagacaacgtgtaccaggaatatttgggcactattcactacagtaaccgcagcggcgtcagagccacttgtccggattgccacgttccgcacgaatggggcccgaaaatgttgcgtaaaatcaaagccagtaaagaactgtacgcgaaaacctttggtttgattgatacgccgcagaaatttgaggcgcaccggctgacgatggcgcagagtgaatgggcgcgtatgaaagccaataattcgcaagaatgtcgaaactgtcataacttcgacaatatggatttcaccgcgcagaaaaccgtggcggccaaaatgcataatagcgcgattaccgaaggcaaaacctgcgtagattgccataaaggtattgcccataaactaccggatatgcgggaaattcctaacggcttttaattccctcctcgtatctgagtgctgtatttttcaacacctcgctggcttttgctgacgaggtgtttttttattgcaaagttatctccactagcgttagctagcgccaggaaaaaaaacttcaattacatgatacggactgaatatatgtcagcaaaaatcgagaatatccaacgcacgttattatctgataattggtatgtgctgaataaatattcttacgacttaaaaagaaaaaacggtgagttagtccatcaggagcgtgaagtctacgaccgaggcaacggtgccactatcttgttatataaccgcgccaaaggaaccgtaatattaatcaaccaatttcgtatgcctacatatgttaacggcaatgaaagcggcatgttattagaagcctgcgctggtctgttggatgcggatactccggaagactgtattcgcagggaagcgatagaagaaaccggttttgaaattggcgaagtggaaaaactatttgctgcgtatatgtcacccggcggcgtcaccgaactggtgcatttctttgctgcggaatatctgccggaacagcgtatttatgccggtggcggtattgatgacgaagatatagaggttctggaaattcccttcaaagaagcgctggcgatgattgccgatggtcgcatcaaagacggcaaaaccatcatgctgctacagcatgcgcagattaagggctggtttgaatgaccgaggcacttttcaacaaattcatcttatgtaagtaactaaagcgtaaaatgttgcgaagagtttgggctgcttcatggtttaggcctattgactcactatactggttctgttcctgattttacctctcaacatataaaagcaaaagggatcctataatggacgaacagttgaaacaaagtgccctggattttcaccaatatcccactccgggtaaaatccaggtctcgccaaccaagccgctggccacgcaacgagatctggcgctggcgtattctcctggcgtagcggcaccttgtctggagattgcggccgaccctttggctgcctataaatatactgcgcgcggcaatttggttgcggtgatttctaacggcactgcggtgctggggctaggtaatattggcgctttagccggaaaaccggttatggaaggcaagggcgttctgtttaaaaaattctcaggtattgatgtttttgatattgaagttgacgagcataatcccgataagttgatcgacattatcgcctcactggaaccgaccttcggcggtattaatctggaagatattaaagcgccagagtgcttctatattgaacaaaaactgcgcgaacggatgaacattccggtattccacgacgatcagcacggcactgcgattatttgtactgcagctgttctgaacggtctgcgcgtagttgagaaagatatttctgatgttaggctggtggtttccggggcaggggctgcatccattgcctgtctgaatctgctggttgcactggggctgaaacgtcacaatattacggtttgcgactcaaaaggcgttatttatcaaggtcgcgaacccaatatggaggcgaccaaagccgcgtatgccattacggataacggccagcgtactttgggagatgccattccaaacgccgatattttccttggctgctccggccccggcgtattgacgcaggacatggtcaaaaccatggcccctaatccgttgattatggcgctcgcgaatccagagccggaaattttaccgccgctggcgaaagccgtgcgtcctgatgcgataatctgtaccggccgttcggattatccgaatcaggtgaataacgttctgtgtttcccgttcatcttccgcggcgcactggatgtgggtgccacagccattaacgaagagatgaagctggcctgcgttcacgctattgccgatctggctctggcggaacaaaacgacatagtggcttcagcctacggcgaacaagacctgtccttcggccctgaatacattattcctaagccttttgacccacgcctgatcgtcaaaatcgcccctgcggtagccaaagcggccatggactctggcgtagccacgcgtccaatcgaaaatttcgatgcttacgtcgagaaactttcagaattcgtctacaaaaccaacctgtttatgaagccgatcttctctcaggctagaaaagagctgaaacgagtagtcctgacagaaggggaagaagaaagagtattgcatgcgactcaagagcttgtttctcaagggctcgcattccctattctgattggtcggccaagcgttattgatatgcgactgaagaaactggggctgcaaatcgttgcgggtaaagactttgaagtggtgaataacgaatccgatcctcgctttaatgaatactggcaagagtactaccagatcatgaaacgccggggtgtttctcaggagcaggcgcgtcgtgccgtgattagcaatacgacggtgatcggttctattatgctgcaccgcggcgaagccgatgccatgatttgcggcaccatcggcaattatcatgagcactattcggtggtggagaaagtcttcggtttccgtgatggcgtacacgtggctggcgcgatgaacgccttgttgttgccaaccggtaatacttttatcgctgatacctatgttaatgacgatccaaccccggaagaactggctgaaattactttgatggcggcagaaaccgtgcgtcgtttcggtattgagccaaaagtagcgctggtttctcattctagtttcggtactgcggattgcccatcagcccgtaaaatgcgtcgtactctggaattggtcaaccaaatggcaccgcagttggaaattgacggcgaaatgcacggcgatgcggctttggtggaaagtattcgccatgacctgatgccggacagtccgttgaaaggtgcggctaatgtgttgattatgccgaatatggaagcagcgcgtatcagctacaacctattgcgcgtgacctcatctgagggcgtaaccgttggtccggtattgatgggcgtggcgaaaccggtgcatattttaacgccgatcgcgtcagtacgtcgtattgtgaacatggtggcactggcggtcgtcgaggcacaaactgagttgctgtaatacttaatcacgttgttgaaaatcagagcctttgtctatcgagacagaggcttttttatcgattttatttttccacatcaatgaaacattcttgttctattattggtacgcaacaaattgtaaatgattatcattatctatattatgcggacgattaaaccgctaaatggataacgcctgctaatgagaatcttattattattcagtatgtttttaatgattagctgtacttctacgcctcctaaaaatattccgagcgataaatccgatattaccgccttcggaaccattaccgatcttcataccggaaaagtcctgacggcctcccagttagtggatgagctggcgggtgctcctcaagtgatcgtgggtgagaaacacgataatctttatcaccatcaaatcgagcggtggttgatagaaaatctggcacagaaacggccacagggcagtgtattgctggaaatgttgaatccgaaccaacagatcaaggtggataaggttaagtcctggctacagcaagagcctcgtgttagggaaagtcgaattgtggagctgctggcttggcagccgggctggagttgggcgctgtacggcgatctggcaatgacggtgatgcgtgcgccttatcccgtgtggtcggcgaatttggatcgagatgaaatcatggcgatctataaggaaaaaccgccgttagagggcaaattttctaccacgccagaagtgcgcgcggcgctggaaaagctaattcgtgcgtctcacgataataaaattgatgcttcgcaattagcttcaatggtggccattcagcagcagcgcgaccgccgtatggctgaacgtttgctggccgcgcccactccaacactattaattgccggcggttatcatgcggcgaaaaatattggggtgcctttgcatatgcaggatcttaaagcggcttcacacccgttggtgctaatgctggctgaagagggcgctaacgtagggccagaaaatgcagattatctgtggtctgtaccggtaaagactttaccgcgctaagaatgtcgccgagcgaaaaaacatcgccacgttaagaatttttccttatccccgcgcaacaaatgcgacattttatgtcgcattattcatttatttgcactgaatctgaaaagagactgttaatttcatttacaaatgattatcattgtcaaatataattgataatcatttgcattctaatcattccatgcattcactgtatttatacgatcaacctttaccaaagccgaaagttggccaaggttttgttctggctatcgctgctcatctcgcagtgtcgtggttgatctttcgcgttgctgaaaccttgcctccgttacctttgccgcctcccgcagtgatgatgcaatggtcggcgcacattgaagcgccagctacgccgaaacctttgccaatcggtgagcagcagacagtctcatcggcggcttctgaaccccagaaaagcgtagagaagcagccggagttaccgaagctggccagagttgaaaaagccaaaattatcgtggctgaaaataagcctgagcctagagtgcggcaaaaacagcccaagccggagaaacctcaggctattaccagcccaactgcgttggcgtctgctgccagcagtgctgccccagtggcacaaagtcagccttctgaacgcgttgccgcgccgataaatagcgatgccaacgcaaaagtggaagccaaaatttcctgggaaagtttggtaagagggcatcttaatcgttttaaacgttatcctgccgaagcgcaggtacgtaaccgaactggaaccgtcttggttgaatttactcttgattatcgtggcaatattcttagcagcaaaaaaataaactcatctggtacacaatccctcgatcgtgaggcgatgagaatgctggaaaaagcgcagccactgccgataccgccagaatcaatattgtatcaggggagacttaccgtcacgcttcctattgattttagtttaattaatcaacagtaatatcactgattctaattgttaaataaccctaggtgaggtcatttgtcttttgatgacccggttagctacagaatttgtagtaaataaaatagacagtatttaattatatcagagggactatgagatattttatatcacctaagattaatgcgggtaattgcttaataccttcgattatttatctcggtttattcagtttctccttatttgcaggtgcggctgagatggctgagccaacgccacctattgcggaaaaacatccacatcaattaactctacattcagaaactcgcgtcgataattactattggctgcgagatgacgaccgcaagaataaaaaggttattgattatctgaaggctgaaaatagctacgctgaatctatacttaaaacaaccactaccttgcaagatacgctatatcaagaaatgctgaagcgagtaaatcagcaggatcaatcggtaccttatagtcttaatggatatcgttaccaggaaatctatcaaccgggtaaagagtatgcgcagtaccaacggcagagggaagtgcctgatgctgaatgggaagtgttgctagatgccaatcagcgtgcgcaggggcatgattactataagctgggtgggctgagcgtcagccgtgataatcagcgtatggctgtggcggaagatacgctgtctcgtcggcaatacagcatccatttaaaacagattgccgacaaacaatggtctgatgaggtgattcatgacacttcgggcaatatggtgtgggcaaacgataataacactctgttttacgtacgtaatcatccgcaaactttattgccgtatcaggtttttcgccatcaatacggtacgccagcagaaaatgatgtcttggtttaccaggagaatgacgatagctattacctcagtttatcgcccagcacttctcgccagtatattttgataaatatcagcagcaccgcgacttcggaaacccggttactggatgccaatcagccacagcaggcaccaacggttttctccgcccgccaaacgggacgtgaatactacatcgatcattttaacgaccaattttatattcgctctaatcatcagcatcctaattttggcttgtatcagactgtatccggggaagcctcttggacaacgctgattgcaccggaagattctaaagacgtagagaattttgtgttattccgcgattggctggtggtcgctgaacgggagcagggcttaactcatattcgtaaaatcaattggcagagtcagcaacagcagccgttgaccttagaagacccgacttatatggcgtggctggcctataacccggagccagatagccacgttctgcgctatcgctattcctcaatgaccacgccgacctcaacttatcaatgggatatgattagcggagagaaaactctgctgaaacaacaggaagtaaaaaactttaatcgcgatgagtaccaaagccagcgtatctgggttacggcccgcgatggggtgttggttccggcgtcgctggtttaccgtaaatcattatttaaaaaaggccataatccactactggcttacgcctatggggcctacggcatgagtatggacccttcgtttagcgcgaaccggctgagtttattggatcgcggttttatctttactttgattcatgtgcgcggcggcggggagctggggcaagggtggtataaacaaggtaaactggcgaaaaaagaaaacagtttcaatgacttcatcgatgttactcaaggtttggtacagcaaggctttggccagccggagcggttgtatgccatgggcggtagcgccggggggctgctggttggggcggtcattaatcaggaacccactttatttaacgcagtagtggcgcaggtgccttttgttgatgttgtgacgactatgtcagattcctcgataccgttaaccaccaatgaatacggggaatgggggaatcctgaaaagttatctgattataaggtcatgcgagcctatagcccttacgacaatatctctcctaaaaattatcctaatttattagtcactagcggattacatgattcgcaggtgcaatattgggagccagccaaatgggtggctaaattacgagagtttaatcggggagataatattattttattaaccacggatatgagtgccgggcacggtggtaaatctggtcgtctcagtaggttgaaaaatagtgcccaggaatacgcctttattttagcaatggacgaaaaagtaaaataattccacataaaaatgtggggtaaacaagtaagaaaataataagaataaaatccagagtattcatattgggtatgaatgctgcacggctatttgaacgctataacacgagcaagtttttaatacggaattttaaattaatttcttgagggatttatgagagttaatctagtggtaaaaataatgggagccggattggtttttatcggattgtcagcaataactcaggctgaaactgaatcggccaataccaaggaaagaatggtattcagcccgttaacggtgtcaggagcaaaaacatcgcctgaaaacagtgcgttggaaaagccaggcgcattcagttctcgcggagaaagcaaagacctgcaatcaatagattcggtgattagaagcatgccgggcacctcaacgcaaatggatcccggtcagggaaccgttagtgtgaatatccgtggtatgaccggctttggtcgggtgaatacgatggtggatggtgtaacgcagagcttttatggcagtgcgcctaacccctataaccatggacagtccccgaccacccaattcggtgcacttatcgaccctaactttatcgtgggcgttgatgtggttagaggcaatgccatcggcgctgacggcgtgaatgcgctagctggtagcgccaatttccgaactatcggcgtggatgacgttattttctctggtaatccctttggcatcagaagcaaattctcgttgggtaataacggtattggtcgcagcggaatgattgctattgcgggtaaaacagatgcttttaccgataccggcagtattggcgcgatgttagcagtgagcggcagcagtattgacgccagttataaaaatggcgatggggtgatgagtcaggaatttggtagtgacgaaacctttaaacaaaatccgcagtctcagttaattaagctgaatatcaaaccgaatgagtttaatgacatcgagctatctggccgagcttataacaataaaatcagccgccgccacattaacagcgatgacttttatattaaatacaactatacaccgttctccgagctgattgatttgagcgtattggccagcgtcagccgcgggaatcaaaaatatgactccgacgcattgaacaaatttaccaactcaagtgctaaaaacagctcagacgcgattgatattaataatgtcagcaaattcagctacgctgatacggattttgccgtcaaaatcggcggtaaattgatgaatactgagtattacaagcatattgaaactactgagccggataataaaacagcaggagaaatactggagaacaacgtgttcgcaccgggcggcagacaggatatctctagtctgtataccggactgcaaataaatcgcggtatttatcaggctaattttgatctcaattacactgaagctaagcttaaaggtttcaaacccgcctgcgacgatcgcatccgctgtttcccgcagggcagcgcgaacattaatttaagtgaacatggctttaatccgagcgtgctgctgtcggcggatattgtgaattggttccagccttttgtcagctatacccaatcaatgcgtgcgccaaacgtgcaggaagtgttttattccaatgagggaggggcttcgatgaacccattcctgaaaggtgaagaggcagaaacttatcagctaggttttaactccgccagccaggggctgatatttaaagatgactcgctgcgttttaaagcggtttactatcgcagcaagattaaaaactatatttccagccaatcttatatgctgtgtgggacgggccgcgtttgtacgttggatcaaatgactagcgaggattggagtacaaccgacggtaactttaatctttacatctacaccaactcactcacgccggtcagaactcacggttttgagctggaagctaattatgacgccggattcttatttagtcgtctgtccttcagcaaagagaataccgaccagccgacgtctatcgccagcggtgttttcggcgcaggcgacaacgctgaaatgccggataaattcttgacgctggataccggactgcgcttcttggatgaaaaattaacggttggcaccattgttaaatataccggcaagacccgcaggatgagccccgcgttagattacgacgaatatgacggaagattgatgaaagaagaaatgtcgaatattccaaccattgtggatatttacagcaattatcaattaaataaaaatgtgatgctgaaagtttcggtgcagaatttgatgaacaaaagctattcggattcgctaaataaactgaacgcgatgccgatgcagcaacgggaagaaaacccaaataatactgccagaggaagaacctatttgtttggcggcgagatacgcttctaacataattagccctgcggttggcaccgagcgcagggcgattattcaaacgcctagccgttttttttctttgcctgctgtagccacttatccagttcattggcaaactgctggcgatcccgttgatttaaagtattaggcccgccggtttgaataccgctggcgcgcatggtatccataaaatcgcgcatatttagccgttcacgaatagtatccggcgtataacgctcaccgcgtggatttaaggctattccccctttttcaatgacctctgcggctaacggaatatcggcggtaatcactaaatcaccaatttcaactcgttgtacgatttcgttatcagctacgtcaaatcctgatgcaacctgtagggtacggataaattttgacggcggtgttttcaacggctgatttgcgaccaaagttaccatcatgccaacgcgatctgccgcgcggaagagtacttctttgataacgttcggacaggcatctgcatcgacccaaatttgcatcagcaggtttctccgtttgtttcatttgcccattctctgaccggcagaaaatcgcggtaaagcacggcttccgggctatcaggctccggttgataattatattcccaacgcaccaaaggcggcagcgacattaaaatagattcagtccgtccgccggtttgcagcccaaacagcgtgccacgatcccacaccagattgaattcgacgtaacgaccacgacgataaagttggaactgacgctcacgctcaccccaaggcagggttttacgacgttcgacaatcggcaggtaagcatcggtaaaacctttgccaacggcctgagtaaaggcaaaacaggtcgaaaaatctggagtgttcaagtcatcaaagaacagcccgccgatgccacgagcttcgttccgatgtttgatatagaaatagtcgtcgcaccattttttatacttgccgtacagatcttccccaaaaggctggcataacgctttagccgtttgatgccaatgcaccgcgtcttcttcaaagccgtagtagggggttaaatcgaaaccgccgccgaaccaccaaactggctgttcaccgggtttttcggcaataaagaagcgaacgttggcatgactggttgggatgtaaggattgaggggatgaatgaccagcgaaacacctagcgcctgaaagctacggcccgccaactctgggcggtgcgcggtagcggaggcgggtaaggtggcaccagacacatgagagaaattcacgccggcctgttcgaatactgtgccattaaccattacccggctgcgtccgccaccaccttcctctcgttcccactgttgttcggtaaaactggcctgaccgtctgcctgcgcgagtttggcgcaaatgtcatcctgtagtgataagagaaaggttttgataatgtttatgtctggtgtattcatcaggattatattcactggcttgggagtgttttaggccgctaagtataccctgattccagcctatagttgtaccgtcagtgtgggttcggtttatgactgctaaggaaaccgaatatcgttgcctactacgaaaattctgcctgaatccgttattatcgtcggtatcgacctcggataataggtgcgtcagcctgagccaactctcttaactatgtgtatccgtatcaatttattattgcgcgtgtagataatcccgcgataatcagaacatcaactttaattaacagcggcgaacactgatggaaattcgcgtatttcgacaagatgattttgaagaggtaataactctgtgggagcgctgtgatttattacggccgtggaacgacccagagatggatattgagcgcaaactgaaccacgatccggatttattcctagtggcagaagtgaatggcgctgtcgtgggctcggtgatggggggttatgacggccatcgaggttccgcatattaccttggcgttcatccggacttccgtggccgcggcattgccaatgcgctgatcagtcgccttgagaaaaagctcattgcccgcggctgcccaaaaataaatatcatggtccgcgacgataatgatgcggtgctgggtatgtatgaaaagttggattatgagattcaggacagtattagccttggcaaacggctgatcgtcgatcaagagtattagcggtgagtaagtcggaagcttaaaaataccctatcccgctgaattgatctgagggatagggcgttcaattatggcaatttggtaatatttctcacatcaacttctactgaattccagtctttatccacctttccttcgatttgtactttatctttcggcgtgatggtctggcctttccaacgtttggcgtcaatatctacggtgatcgtgccggtattgtcgcggaaagtgtagttatcgtggctcaaacgctcttcgatataaccttgtaaagtgacgcgagtgtcgtcacgcatggatttgactttatctacggttgtgattgccgcgcttgggccttggaaaccgccttgggttgcgggctgagtttgggttgttgacgggccctcaaagccaccggtagttggagtagtggtggtttgtgctaatgccggagtgctacataaagccagaaatgttgctgctgtgatgaacttcttcacgttatcgctccttcaatcaataaatgattatgtccgatagccggggaaatctcgtcctttgagtcgccgataataaccagaccgcaaaaaatgcttaaatatcgcgacctgagcggtcattatagtttaggaatataggttggcaataatccgatggctgcaaaatgaagagcatctgtgaagataagtggccgattaatatggcgggattacgaaaatatgagcttctttggtgcgactgtcataccgaggggctgtgactacggcacttttttagcaaactgaactccaaccagtgaatcattgagcgctgttctactgaaacgggctttgtctgtgggccgaaagcaagtgattatcggtatcaccgtttttgtcagttaattttaaggagctataccatgaatttacgcccgttattgcttgggttgccaatattgctgacggggtgttctgcgctctcaaatttttcttggtcgagcctgtctcccacgaattggtttggtagtagcctgcgggtgaccgaggaaggcgtagggagtattactgccgccacggcgatgaatcaggatgcgattaacgaaggtctgaacggcgattaccgcttacgcagcggcatggctggcaatggcgatagattaatttctttttatcaggcgatgaaggacgctcaggttaaactgattatttcaggccagcctaaaggcactgtcgaacgcattgacgttatggacaaaaatatttccagccagtggggcgtaaaactggatacaccatttagcgatatctttgagcaggcttatggtgcctgccagaaagctaccggtgatgatgccgaaagcgtagagtgcgtggctccagaaagtaaacatgttagttacctgtttaccggcatttggcatggtccggaaggattaatgccatcaaacgacgcactgaaaaactggaaagtgagtaaaataatctggcgtgctcaggctcattaatcttagccgtaatgggattattttaacgtcgtaaaggctcctctgtcggagcctttattatttctggggaaaaatcacggtggtagccgcctgctagcattggggctattcctgttttattttgcgctgacgcaatgtaataattaaggcgtcgcgtatgatgtcgaacagaatataaagttgggggaagaaccccaactcccagtttttattgaggaagaaatcatgtctcaggttcagagcggtattttgttggaacattgccgttttgctatttttttggaagcaaaaattcagggtgaactggatgacatccgtagcggttctaaaatattctgccaatcgttggtggagttacaacaacaataccctgatgcacatttaggcgcggttattgccttcggttctgacgtatggcatgacctctccggcgggcagggcgctgctgaactgaagccttttgtgccgttgggacgaggtttggcaccggcgacccagcgtgacatgctgatccacattcagtctctgcgccatgatgtgaacttctctctggctcaggctgcactggccgcattcggtaaaactattgctattgaagaggaaacccatggtttccgttgggtggatgaacgagaccttaccggctttattgacggtactgaaaacccgcagggtgataaccggcctgaagtcgcggtcattgccgaaggtgaggaagacgctggcggtagctacgttttggttcagcgctatgagcacaacctgagcacctggcagcgccaaccgcaggaaaaacaagagcaaatcattggccgcaccaagtcggatagccaggaactgccaccggatcagcgtcctgatacctcgcacgttagccgggttgatttaaaagaaaacggtaaggggctgaaaattctgcgtcagagcctgccttatggtactgccagtgggaaacacggtctgtatttcatcgcttattgcgcacgtttacacaatatcgaacagcaattgctaagcatgttcggcgatctggatggcaagcacgaccagttgctgcgttttagtaaggccgttaccggcagctattatttcgcgccgtcgctgactaaactgctgtcgctatagttatagtattttctgcaaaaaaacgtataaaaaagccggattgctatttagcaccggctttttttatagctcaatggcagtggtctacatatttcttgggaagattacagcgccactgcgtcacgcattctgttcagcacagtttgtttttgttctttagttagagcacgtaacggcaaccgcggattaccagcatcaataccgtgtaattgcatcgcagctttacctgcggctacgccacccaactctactagtacacgaattagcgcaatgacctgatccatacttctttgcaccgcagcatggttaccagcgttgaagtccgcaatgattttatggaacagtggagccgcgtaattataagtgctgccaacggcaccaatagcgccaacagccaatccgcccggcagatgttcatccacgccaaacggaatatcaaacttgccaccgctaacccgtaggcagcgttggaattcatacagatcagcattattgaatttaatgccggacaggttaggaattttagactcggctttaattaagaactgttccatatccaaattcacgccagacatcccggaatgataatagtaaaagccttttgacggagccgccgctgcaattgtctgacaataggcaattaaatcatccagattacctggcttgaagaaacaggggccaatggctgaggtcgcgaaaatatccagttcttccgcatggcgagacaaatccaccgcatctttaatactgagagcgcctgtgtgcagcgtaatgctcaattgtccctgtgcggcagcaacccagcgctcggcaatttttttacgttcttcaacggagcaatgaataccttctcccgtggtgccgcaaacgtaaacaccttttacgccatcattaatcagatgctctgcaatctggtcaatgaccgggtaattgacttcaccgtgctcatcaaacggagtgtgcggtgcagcgataaggccggttaactttttcatacttatccttaaactcgaagagatagcagggggggagtttgtttatggaggataactccgccgttaaaattaagcacgtcaggaagactaacgctgcttgatggcatcggtgaaccagccgcagatatgttcaatgcgggtgatggcggagccgacggtaacggcataggctcccgccttaatcgcggcggcggcgagcgccggtgaattatagcgaccttcggctatcacccggcaaccgacctgagccagttggtttaccagcgctaaatccggctcagacggcgtatttttcgaggtatagccggataacgtggtgccgataaaatcgacgcccaagcggtgagcgctgataccgtcggtatagtcagaagcgtcggccatggataaacgaccagaagctttaattcgttcaaacagcatttccaccgaaacggggcgctctcggtgggttacatcaaaagcgataatgtcggctccggcggcaaccaatgcatccacatcttccagccatggggttattctgactgcgcagcccggcagatctcgcttaacaatgccaataatgggcgcatcggtcacttcacgcaccgctttcacgttggcggcaccttcaatacgcaggcctacggcaccgccgtccagcgcggcttgcgccatggcggcaatcatttcggggcgatccatggcgccgttgggaaccggttggcatgaaacgattaatccgttctggagctgatggcggaggtggattggattgctcacggtttttaactccggtattttatcttaaatgaagttttactccatcatgttagatcttttattcgacgggcgcaacgactgaacgagcaaaatgtgaacccgtaggaaagggtgccagtcccttttcctttggccgcattttctgtttgcctattagagtgagttgagatagtttcattcgaagtaaaactccattttattttatttttcggagtgtgatcggtgggcgtagaggctgaggcacagagaggcagcggtatgaagcagggcttggtactggatattggtggcactaaaatcgccgccgcgcgagtgaatcacaaaggcgaactgagtcaacggcagcaaattgccactccgcgaggagacgcagaacggttgcaaagaacgctggaacaattgattgaaccccatcgacaacatgttgattttgttggtgtggcttcaacggggattgttagtaatggttatctcacggcgctaaatcctgccaacctcggtggcttagctcattttccactgcaagcttgtattgaaggcatcgcgaatgtgccttgtgtgctgctaaacgatggtcaggccgcggcgtgggcggaatatcagactttgtctattgccgtgaataatatgatgttcgtgacggtttcaaccggcgtgggtggcggtattgtcctgaataataagttacataccggtaatcaaggattggccggccatattggtcacaccttggccgatcctcacgggccgatgtgcggctgtggtcgacgcggctgcgtagaaagcgttgcgtccggtacggccattggcgcagccactgctgcctgggctgagccggtcactgccgttgaggtatttcgcatggcaaaaaatggccagcggcaggcagaacagattattgacgattcagcggcagccattgcccaaatggtggcggatatgaccatggctctggatctggaaatggtggtgatcggcggtagcgtggggttagccgaaggctatctcgatagagtgaggctggcgcagaaaacgttaccggccatctatcgtgcgcctttgcaggcggctcattaccgccaagatagcggtttatcgggtgcagcgctgtgggccacagccacgctgtaatcaatagtgcaacctagtgacgaataattaagattatccgttgggatataaggcataaaaatgattcacggtaacttaaatcagcccgaattttttggcggctatccggaaagtattcaaatgatactggcgtatttgtcggaaataccggttaacgaattgtcctgcggtcgtcatgatattaacggcgaggatatttttatgaatgtgatggaatttgacactcagccagcggaaagtaaaaaagcagaaatgcatcttgtctatgccgatgtacagctgctcattcgcggtgtggaagggattgaatattcaacccaaacgccatcagaacatctggagccttatcaggctgaggatgattatcagcttattgccgaaattccggataaaagccaattacgtatgctccccggtatgtttgcggtattcctaccgggtgagcctcataagccgggctgtcaaattatcggttctggtacgattaaaaaactggtggtgaaggtgcattgccgcctgctggacgacactctattatcctgatttccctataataagaaccttagttatctttgacattttccccggccccccggggttttttattgtttctaccgccgctctccggcctcatttgtcttcacgaagcctgccaactatgtaatcatgcccaccaaatttaaactcaccctgaggtgtttgtgatgaaaacgggtactccacgtttccagcctggaaaaattcttgatgccttgggggcgatgcaaaatagcctgactcgttctgctcagcgtattgcggcctatattctgacggagccggctaaagtgactcaggtttctattgctgaattatcctcattaactcaaaccggcgaagccaccattattcgtttctgccgcacgctgggctataagggattccatgatttcaaaatggatttggccatcgaagttgcaaccagcaatgcgtcaaataatgaaaatagcctgttagacgcggatgttcaggatagcgataataccctgactattggtagtaaattgcaggtggcaattaataatgtgttatcagaaaccctgaatttgctgtcgctggaatgtgttgaaaaagtggttagcttgctgcgtccggcagacagaatctgtatttttggcgtagggtcttccggtattactgccgaagacgccaaggcaaaattaatgcgtatcggcctgcgagtcgatgccgcaaccaataatcattttatgtatatgcaggcttcattaatgaaagccggtgatgtcgctattggtattagccattcaggtacttctacagagaccgtagaggcattgcggctggcaaaacaggccggagcgacaaccgttgccttaactcataatatggggtcgcgcattaccgaactggccgattatgtattaatcaatggcaaccgtcaggggcaattacaaggtgactctatcggcaccaaaattgcccagttatttgtgttggatctgatttatgccttattggtgaaagctgatcctgagcaggcggagagtacgaagcgtaaaaccactctcgccgttagccagaacggataagctgcaaaaaaatataatctcctttgcaaaacgcacttctcccgtgaataagccatctctacgttatatctacggtggcttatttggttcttcccggtaatacaaacatttcgccatctttgtcacgttttctacacattgtgattgaaaagagagagtgatcttatacactcaattggagttttactcctttttgtgttttatttcggggtttaactgcaaaaaacataagcgtagctatcagcgcaattagctgctttaaatatgcgttaaaacaatgagatgctgattgttaaacgcgtggccgggataatagatttccgtcagaggcttatcaatgacgggggagaacgccttaatatgaatacttcaatacagcagcgctggtataaacagctgacgcctgctcaatggaaggcatttattgccgcatggatcggttatgccctggatggctttgacttcgtactgatcacgctggtgctgaccgatataaagcaagagtttggtttatcccttattcaggccaccagtttaatctctgcggcatttatttcccgttggtttggcggattagtgctgggtgctatgggcgatcgttatggtcgtaaattagccatgattaccagcatcgtcctcttttcctttggtacgctggcatgtggtctggctccgggttataccaccttatttattgcccgactgattatcggtattggtatggcgggagaatatggctccagctcgacttatgtcatggaaagctggccgaaacacatgcggaataaagccagcggcttcctgatttccggtttctccattggcgccgtattagccgctcaggcctatagctatatcgttcctgcttttggctggcggatgctgttttatattgggttgttgccgattattttcgctttgtggctacgaaaaaacctgccagaggccgaggattgggaaaaggcgcagaatcaatcggctaaacagaaacccgctaaatcgctaaatatggtggatatcttgtaccgcagtaacctcagttacctgaacattattctgacggtgtttgccgccgcagcgctatatttctgcttcactggtatggtttcggcacccgttgtggtggctctgggaattttatgcgcggcaatatttatctactttatggtgcaaaccagtggcgatcgctggccgacgggcgtgatgctgatggtggtggtgttctgcgccttcctctattcctggccgattcaggcgctgttgccaacttacctgaaattggagctgggttatgatccacatactgtaggtaatgtgttgttctttagtggctttggcgcggcggttggttgctgcgtcggcggttttctgggcgattggctggggacgcgtaaagcctatgtagccagtttactcgtttcccaattgctgattatcccgctgtttgccatgggtggcgggaatattatgctgcttggcgcggtgctgtttttacagcaaatgctggggcagggcattgcgggactgttaccgaaattattgggcggctatttcgataccgagcaacgcgcagccggtttaggctttacttataacgtgggggcgctcggcggtgcactggcaccgattctgggcgcgtctattgctcaacacttgagtctgggaactgcgctgggatctctatccttcagcctgactttcgtggtgattctgctcattggttttgatatgccatcgcgcgttcagcgctggattcgtccgaaaggattgagaatggtcgacgccattgatggtaaagctttcagcggtgccaagggcaatgccacggcgcagccagtcacgctgaaataatccctcgcgcgtgaggttaaccacggcgctttcacaaagtctggctgatatcagccagactttcttatttttgtcagtcgcggggaagaggcggttttgctgccttagagcatttcatacttgcacatcactaaacggtatataaaagcgttacagctatatgcctagttataaatacactgatcatcattaaggcgttatcagcccggcgaactcagtgactaaggtgcagaatgaaacagaacttgatgaaaaatggcaggctggccggatggtcaaaagcggctctgttgagcgctttggtattgggcagcgccacggtttctgccaccgagttactgaacagctcttatgatgtttcccgcgaattgttctccgcgctgaatccgggtttccagaaacagtgggaagctcagaatcccggcgataagctgaccatcaaacagtctcatgccggctcatccaaacaggcattggctattttgcaaggtctgaaagccgacgtagtcacctacaatcaggttacagacgtacaaatcctgcatgatcgcggcaatttgattccagccgattggcaagcgcgcttgccgaataacagttcacctttctattccactatggcgtttctggttcgcaaagataatccgaaaggaattcacagctggaatgatctggtgcgtgaagacgtcaagctggtgtttccaaatccgaaaacctcgggcaatggccgttatacctatttggccgcttggggcgcaaccagtcaggccgacggcggtgacgatgctaaaacccgcgactggatgaaacgtttcctgaaaaacgtggtggtatttgataccggtggccgtggcgcaactacgacttttgtggagcgcgggctgggcgatgtgctgattagcttcgaatcagaagtgaacaatattcggaaagaatacggcagcgacaaatatgaagtcatcgtcccgccggtggatatcctggcggagttcccagtggcgtgggtagataaaaacgtcgtgaaaaacggcacggaaaaagccgcgaaagcttatctgacctacttgtacagccctgaagcgcagcaggttattaccagctttaactatcgcgtttatgacaaaaccgccatggctgcggcgaaatcgcagttcccggaaacccaattattccgcgtggaagaacagttcggcagttggccgcaggtgatgagcacccatttttccagcggcggcgtattggataaattgttagcggaagggcaccagtaatgttgtcggcgtccagcaagcgggttctgcccggattcactcttagcctcgggagcagcctgctttatacctgccttatcctgctgttacctttgagcgctctggtgatgcaactggctcaaatgagtctggcgcaatactgggaagtgatttccaatccgcaggtggtcgcggcttacaaagtcacgctgttggccgccggcgttgccagcgtgttcaacgccgttttcggtatgctaatggcgtggattttgacccgctatcagttccccggccgcagtattcttgacggtctgatggatttgccttttgccttgccgacggcggttgctggtttaacgctggccacgctgttctccactaccggttggtacggtggttggctggcacagtttgatatcaaagtttcttttacctggctggggattgcagtagccatggcttttaccagtttgccatttgtggtgcgaaccgtgcagccggtgttggaagagttagggccggaatacgaagaagcggcagaaaccctgggtgccactcgttggcagagtttccgtcgggtggtcatgccggagctggctccggcgctgctggccggtactgcgctatcatttacccgcagtttgggggagtttggcgccgtgatttttatcgccggtaatatcgcgtggaaaaccgaagtgacctcgctgatgatttttatccgcctgcaagagtttgattatccggcggctagcgccattgcctcggtgattctggccgtgtcattggtgttgctgtttagcatcaataccttacagagccgctttggtcagcggattggggggcactgatggcggatatttcagaatttaacggtggtgctgttcgcccgcctttcaactggggaaaatggacgttaatcgccattggcgcggtgttttccattttgctgttagtgattccaatcgcctggatttttatcaccgcgttctccaaaggaatagaggtggtagggcagaatttagccgatccagacatgctgcatgctatttggctgacggtgttagtcgcgctgattaccgttccggtgaatctggtgtttggcgtcgtgatggcctggctggtgacgcgttttcagttccccggtcgccaattattgatgacgctgattgatattccctttgctgtctcgccagtggtagcgggtctgatgtatttgctgttttacggttccaacggcgtggctggcggctggctggatgcccatgatattcaactgatgttttcatggccgggaatggtgttggtgacggtatttgtcacctgcccatttgtggtgcgggaactggtaccggtgatgatgagtcagggcagccaggaagatgaggctgcagtattgctgggtgcttccggttggcagatgttccgtcgcgtcaccttgccgaatatccgctgggcgctattgtacggtgtggtattaaccaacgcccgcgccattggtgaatttggcgcagtctccgtggtatccggctcaattcgcggtgaaacctacaccttaccgctgcaagttgaattgctgcatcaggattacaacaccgccggtgctttcactgcagcggcgttactcaccctgatggcgatagttaccctatttctgaagagcggtctgcaatggcgcttagcgcgtcaggttgttcgcctcgaacaggaggaaaagcatgagcattgaaattaacaatatcagcaaatattttggtcgtaccaaggtattgaacgacatcgcgctggatattccttctggtcagatggtggcactgctggggccttcgggatcgggtaaaacgacgttgctgcgaattattgccggtctggaaaaccaaaatgccggacggctgagtttccacggtactgacgttagccggctacacgcgcgggagcgccgggtgggttttgtgttccagcattatgcgctgttccgccatatgacggtgttcgacaatattgcgttcggcctcacggtattaccgcgccgcgagcgcccaaatgcgacggccattaagcacaaagtcgaacagctactggaaatggtacagcttggtcatttggcgaatcgttttccttcccagctttccggcggtcaaaagcagcgagtcgctttggctcgcgcgttggcggtagaaccgcagattctgttgctggatgaaccttttggcgcgctggacgcgcaggtacgtaaagaattacgccgctggctgcgtcagctgcatgaagagctgaaattcaccagcgttttcgtgacccacgatcaggaagaagcgatggaagtggcggatcggattgtggtgatgagtcagggcaatattgagcaggtgggcacgccggatgaggtatggcgcgatccggccacgcgttttgtgttggaattcctcggtgaggttaaccgattaagcggtgagatccgcggttcgcagctttacgttggcgctcaccactggccgctggatctggctcctatgcatcaggggcgcgtcgatttgttcctgcgcccgtgggaaatggaaatcagtactcaggccggcgctcgctgtccgctgccggttcaggtactggaggtcagcccgcgcggccacttctggcagttaaccgtgcaaccgataggctggcatcaggaacctatcagcgtggtattaccagaaggtggcgtagctgcgccagtgcgaggcaatcgctactacgttggcggattgaacgcgcgactctattctggcgatcaattactgcaacccattgctatggcgcaaagcgcctgatagtttttgctcaccgcatataatcaggtggcctattggccgcctttttgctttgtccgaacgtggcgtaaaactcatgccatcgggcacttttattcgcttaataggttaataatgtgacaaccctggaacagtgtatcggtaataccccgttggtgaaattgcagcgtctgacacaagggctgaacgccgatgtgtgggtcaaactggaagggaataatcctgccgggtcggtaaaagatcgggcagcgctgtccatgattcagcaagcggaattacggggtgatattcatgatggtgatgtattaattgaggcgaccagtggtaacaccggcattgctctggctatgattgcggcgatgaaaggctaccgaatgaagttactcatgccggaaaatatgagccaggagcgtcaggcggcgatgcgagcctacggcgctgaattgattctggtcagccgtgagcagggaatggaaggcgcgagagatctggcgctggagatggagcggcaagggcagggcaaggtattggatcaattcaataatcaggataatcctctggctcattttactggcactgggccagaaatctggcagcaaacggcaggaaaaataacccatttcgtttccagcatgggtaccaccggcaccatcaccggtgtaagtcgctatttgaaaagccagaatccgcaggtggaaattatcggtctgcagccggcggaaggcagcagtattcccggtattcgtcgctggtctccggcttatttaccggggatttttcgtccagaactggtcgatcaggttttggatattgggcagactgacgcggagaaaaccatgcgtcttctggcggagcaggaagggattttctgcggtgtcagttccggcggtgcggtggctggcgctttgcgcgttgcggcagaacgtccgggcgcggtgatcgtggcgattatttgcgatcgtggcgatcgctatctttctaccggcgtttttgattagtgacaccgttaaatatggcatccgaagttagcgctacacttcggatgcgtttcagctactgctggcgtaaccggttgccatcccaagataattgtctaatggacgccactgccgcgccgttatcggtttccccgccaatcagccagatattatctccatcctgaatagaaacgccgtaacccaaaggttgaggtaatttcccgacgattttccattccccgttcaccaatccatagacttcgtcacgccagttttttttcagtccttgatgagcataaagctgaccggcgttaaattgtgctctggcaccggggaagttggctccgcccgctaccaatatggcctgatggctaataccagcaaaagctccggccaacccttcctgttgcattttatcgctggctggaatcagatcgggcaaccgcttccagtgcatctgatcttgttgccatgtcccttctagcgcttcggcggttcgtaatcctggtttgacttctccgttaatcaaaatgactcggttttgccgagtcgcgatagcagagcctgcgcggccaaattgaggcaactggccgccggatcgccattgattattcgtcgggttataaatcatgatttcccgattgaagaaatagctctccggtgcctgattgaaataagtctgagccacggcatctttttgttgcgccgtttgagctgcgcttaaatcctgaaaatagccgtcaaatacctgcttattcaccccacctataacccatgcccgttgaccatcaagggaagcaatagcggtgccaaccaatccctgaggtgcgcgggttggcactttttcccaacgattgtccgatggatcgtagcgataaacttcggttaaagcttgtggattggccgcgttttccgtggctttaccgacgccaccgaaaacataaagcttgccatcaagcataacggaaaccgcctgttctcgcggctgagcggggaattcagctattttttcccagattggtgatgtatgagcaatatctatccgaaaccagttcttacctgcgctacctaaacccacgtaaatgaccgaaccatttatggcgccagtaccgttcttgaatgacaaaggaacatcaggtaaagccgctgcctgactaagggaaacagagcctattgccagcaaagcgtaaagaaaacctcgagttgccttgaacatgatgccattcccttatccagagtttgagtattattagaatgtttaactccattattaaaaataaaacggagttaaactattatcaataacatacccagtccgtcgataaaatcgcaatgggaaagcgcatttttgtgaccgcttaccgaaattactctcgctcaagggcacggatcggatccatttcggcggcacgtttcgccgggaaaaagccaaaaaccacgccaatcaggctggaacagagaaaggcgctaatcatggaggtcgcggagtacaccatagtaaaactggtgctgaactgactgaataacccgccgatcgccagcgacaacaacacgccgaggcaaccgcctaaaagacagaccaataccgcttcaatgagaaattgctgcatgatatcgctggaacgggcgccaacggccatgcgcacgccaatctctttggttcgttcacttacggaaaccagcatgatattcattacgccaatgcctccgacaatgagcgaaattaccgcaatcatagataccaatagcgtcatggttgctgtggttttctcgatggtttgacggatactatcggtattcatcacgaaaaaatcctgattgccgtgacgctgagtaagtagttttatgacgccctgctcagcgttagctaagtcaatatcatcgtttacccgaacggtgatgctctttaagtaggactgaccgagcatacgcttcatcgccgtggtatagggaatccagacgttcagattttcatcactgccaaaaccgctctgttttttagccgccacgccgataatccgacaggggagggaaccgagtaaaatcacctttcccaatggattttctccgtttgggaacagtttgttacgcgtgttctggtcgatgacaacttcttgcaacaggttgtccacgctggtgcgggtgaaggccattccctgatcgatttggtagccgcgcacggtgaagtattgctcgcccacgccgttgacggtaccggataccgattggttgccgtagcggaaaatcacgctggtagacagcgtgggcgtaacgctgtgaacgtaaccttgctgggctaatgcatcagcatcggtggcgcgcagcgtttgaatcgctgccgaacgcctatcgccaaaatccttgccagggaaaatctccagcgtactggtgcccatcgcgctgatattagccagcacttgttgctgagagcctttccccagagcaaccactgaaaccaccgatgcgataccgataataatacccagcatggtgagaaacgtgcgcaatcgttgggcggccatcgacaacagcgccattttaaaggcttcttgcagtcgatcgcgttgcctcagccagcgagagggctgaatcgatgtttcgatcgtggctggcaggtttttctccagattttctagcgtatcaggttccagactactttgtgagtcgcggtcagcgatgatttctccatcacgcagctcaataattcgctgagcatgttcggcgatgcgcatatcgtgggtaacaatgaccaccgtatgtccctgagcatgtaggcctttgagaatactcaaaacctcattaccactgtgggtatccagcgcgccggtgggttcgtctgccagaatgacttcgccgccgttcatcagcgcgcgggcaatgctaactcgttgctgctggccaccggaaagctggctgggatagtaatccaaccgttcgtttaaccccaaacggccaagcaaagccgccgctcgccgacgtcgtatttcccgttgactaccggcatagatagctggaatttcaacgttgccctgggcggttaaatctcccagtaagtgatagcgttggaagataaagccgaagtgttctcgacgtagcttcgccagctcgtcattactcatcagttgcggggcttgtcctgccacccaatattcgccagaactgggtttatccaagcagccaagaatattcatcagcgttgattttcctgagccggaagccccgacaatcgcgaccatttcgccctgatgaattgtcagattgatgtttttcagtacctgaacgtgctgttcgccgttgatgaattgacgacaaacattatccagatgcagcaagatcgtttttgattgggcgctatgcattatcgcatccccatcggtaggcccatgcgctgaaccttactggtcattgcagtgccgctggattggctgataatcaccttctcgccggcctgaagtccggaaatcacctgtgcgtccacattgttattcaatccaatggtgacatcacgcagactaatattccctttttcatcaaccacttgaacctgattcttattgccccgatgttcaatggcggtagaaggaatgacaatggcgttttctgctttgtccaacagaatatatacctgtgcagtcatggaaatccgcagttcgccattgggattggccacgtcaaacaggccattgtaataaatggctgtgttggtggacgatgtactgctggcgctggatgaggtgctggtatcgtcgtcgttgattgagtcgggagccggttctacggcgcgtagcgtggcgctgaaacgttgctgcggctgaccgagaatagtgaaatatactggcataccggttttgactttgatcacgtcggcttcggaaatttgcgcttcaatggtcatggtatccagacgtgcaactttaatgatggtcggtgcgctttgtaccgcgttaacggtttggccttcttccacgggaatagctaccacggtgccttcaattggcgaggtgattttggtgtaacccagattgagctgcgcggtgctcacggcgattttggcttgagcgatttgagcgtccagcgcttcaatttcggattgagtggcagctagagtggctttggcgctgtcataatcggcttgagtgcccacccccattccgaggattttctgttggcgctgataggtttggcggttattttccagcgtagcctgtttggcggcgcgctgcgcctgcacgttttttaaagcggcttccgcgtctttcaaagcgttttgttgagtcagatcgtcaatttcggccaccaactggcctttttgcacttgttgaccaagactgacatgtagggctttgatttgcccagaaacttgcgcacccacgctaacctgttttttcgctttgatggtgccatcagccagaacggtttgctccagattgccgatttgagcggtggcggtgatgtaagcgggcttttctggcgtagagaaaaataaaaaatagagaacgaaacctgccgccagtagtgccacgagcagccatagcgcccgtcgtttggtaccaatgagttgttgcataattgaccaaatttccttgagtcattctaagacaaaatctacagagaaatactgagtcataatttaccgccaagcaccgccgttaggggtaaagcggattttaggaatatgtaaggattcagtaaaactggctgcgctggcgataaattggcaggaaaataggtgaaatcagttaagggagaaatatatgaaaattctattagtcgatgatgatattgagcttggctcaatgctgaaggagtacctgagcggcgagggttttcaggctgatttggccgttaccggtaaatccggtattgatggcgcattatccggcaattataccgcgctgattctcgacattatgctgccggatatgagcggaattgacgttttacgacaggtgcgccagaaaagtcgattgccgatcatcatgctcaccgccaaaggggacaatatcgatcgggtgatcggtttggaaatgggcgcagatgattatatgccgaaaccttgctacccaagggagctggtggcgcggctgcgggcggtattacgtcgcttcgatgagcggccagagcaaagcagcggtgactccctgctgacgctgggagcgctgacgttgaatcccgctacccgcagcagccagtggcagggtaaagcttttgatttaaccgcctctgaattcaatctgctggaattattgctgcgttcgccggatcgggtagtgactaaagacgaactgtcggataaaggtctggggcgaccgagagaagcctatgatcgcagtgtagatgtgcatatcagcaatattcggcaaaaactcagccagttgccgaataataacctcaatattgaaaccgttcgcagcattggctatcgcattaaataacggtttttcaggatatgattatgcgtggacgcctgttttggaaaatcctattgggtttctggtttacctttattttgatgacccaactgctttgggtgattttttctttctatggcaaccgacacgagccgccggaaaacggcatgatgcgacagattgtggcccagcagatgaaatccgccgcctcggtgctgagcagcggcggtttgtccgcgctggaaacgatgatgtccggctggacggaaccggaaaaaaccttgttttcagtgcgacctgaatctgcggttccgccggtttctgctgcaaaaacactcaccgattcaccgtcacacctcgttaagtgggctacaacacctgagggcgataaatatcagctaagttatgattttgacggtatgcgggcggtttatcatccaaaagggaaaagggatcagattctgaacattcctaaacccttattctggatgggcgcattgggcgggctatttttcagcacttttttggcatggaatctaacccgtcccatgcgccagctgcgggatggctttgagcgagtcgcgcagggcgatcttgcggttcgcttattaccgatgatgcgtcgccgccatgatgaattgaccgaagtggcacgtgactttgactcaatggctgagcgtttacaggcgctagtgagcgccagagagcaactgctgcacgatgtttctcacgaattacgctcgcctttggcgcgtttgcaactggcgattggattggctcatcaaaacccaggaaacgtgaatacttcattgcaacgcattgaacatgaagctgaacgtctggataaaatgattggtgagttactggcgctttctcgcgcggagaatcaaacgctaacccatgacgaagaatatttcgatctgtacggattggtagaagcggtggtgaatgacgcacgctatgaggcgcaggtgccgggcgtggagattgtgttacaggcggagcctgaaagggaatatacggtgaaaggcaatgccgagctgatgcggcgcgccgtcgataatatcgtgcgtaatgcgctacgtttttctacccagggccagcaagtaacggtcaggctttcacagatagaaaaacagtatcaaatcgaagtggtcgatcaggggccgggcgtggaggaaagccgcttatccagcatttttgatcccttcgtacgtgtgaaatcggctatgtcaggcaaaggttatggcctgggattagcgataacccgaaaagtgattctggcgcacggtgggcaggtagaggctaaaaatggtgagcagggcggcttggtgattcgtttacgtgtcccgcagtggtctacgcactagcggtaaaatactaagagcgtagcatccgacaataaaaaacggcgcctaagcgccgttttctcatccgcaatattattacttcttgatacggataatcggtgtttcaccgacggtcacgctgccggaaagtttaatcagttctttgatctcgtccatgttagagataacaaccggagtcagggtagacttggctttctcttccagcagggccagatcgaactcgataaccacatcacctttcttcactcgttgaccttcttcagcgatgcgtttgaagccttcgcctttcagttcaacggtatcaataccgaagtggacaaacagctcgatgccgctgtctgattcgatagagaatgcatggttggtttcgaaaattttaccgatggttccgtcaaccggagcaaccattttgctgcctgatggtttaatagcaatgccatcaccaacgattttttcggcaaaaacaacgtctggcacatcttcgatgttgacaatttcgccagacaacggcgcaacgatttcgatagtgccgctgtctttcttatcatctgaaacaaatgatttcagtttatcgaacaaacccatgatcttctcctaagtatttatattggacagcgttccagtctcatggaattagcagagtgttttctcttcgatgaacgtattaaccaagtccatcaattcttgcgccgttggtttagataacgcttcagcagccaacgccttcacatcttcgaaattcgtgttacggataattttcttgatgcgcgggatcgagattgcactcatgctgaattcatccagccccatgcccaataacaacagtgtagcacgttcatcgccagcaagttcaccgcacataccggtccacttaccttcagcgtgagatgcatcaataacctgtttgatcaggcccaataccgcaggcgacattggattatagagatgagaaatcagctcattgccacgatctactgccagagtatactgagttagatcgtttgtcccaatactaaagaagtcaacttcttttgctaaatggtgcgcgatggttgccgccgctggcgtttccaccataacacccacttcgatagattcatcaaaggctttattttcttcacgcagttgagctttcagcatctccagttctgctttcagtgcccgcacttcttcaacagaaatgatcatcgggtacatgatgcgcagcttaccgaaggcagaagcacgcagaatggcacgtaattgcgcatgaaggatttctttacgatccatggcaatacggattgcacgccagcccaagaacgggttttcttcttttggcaggttcatgtacggcaggtctttatcgccgccgatgtccatggtacggacgataactgcctgagagcccatggcttccgcaacggctttataagcctggaactgctcttcttccgtaggaagagagtcgcggtccataaacaggaattcggtacgatacagaccaacgccttcagcgccgttacgttcagcaccggcgatatcgcgaacggtaccgatgttggcaaccacttcaacctgatgaccatctaaagtgatagccggcagatctttcagtttagccagatcgtttttctcggtgatgtactgagtattcaccgctttcaattggtcgatcacatcgctggttgggttaacgtaaatcttgttgttcaccgcatcgaggatcagataatcgtcgttcttcacctgtttggttacgtcgctggtgccaacaattgcaggcaattccagggagcgcgccataatcgaggtgtgggaagtacggccaccgaggtcagtaatgaagcccagaactttatccaggttcaactgcgcggtttcagacggcgtcagatccgttgcaaccagaatcacttcctctgaaattgcccccaaatcgacgatggtcaggccgagaatgtttttcagcaggcgtttaccgatgtcacgtacgtcagctgcacgttctttcaggtactcgtcatccagttcttccagcgctttcgcctggccttcaatgacggtatatgcggcagcgtcggctgaagcatgttcgtctttgattagggctatgatttcctgctcaagctcttcgtcttccaacagcatgatgtggccttcgaagatggcagctttctcttcgcctaggctctcgccagctttggtcttgatcgcttctaactgttcagatgctttcgcccggccagatttgaaacgctcgacttcctgctctacctggtcagcagagatttttttccggttgatgacaatctcatcttctttcagtaaaagtgctttaccaaaagcaatacccggtgaaactaaaatgcctgaaatcataaccctaccttactcttgactggttttaacttaaaagactgggcttcttttactcaagctctgccatcagttttaccaggtgttcaacggctttctgttcgtcatcaccttcagcagagatggttactacagtaccttgggtcagacccagagtttgtagtttgaacaggctcttagcgctggcgcttttgccattggaagtaacggtaatttcagaagcaaaagctttggcttctttaacaaactgtgcagcaggacgggtgtgtaggccattcggtgcggtaatagtaacttcttgctggaacattgtgtttccccaacttattttggatttatgttgtggagctaaagtctagtgtaatttcctaactttagcctgtattggctagcgccagactatggaacaaaaagacaagctctgatgcaacaggaaaccagagtcatcgccaaggaggataaccttctcttcgcgttgtgtctccaatccacattatgtatgtcgcatattactcttttcagcaaaatgattaaatcgattcagctaaagtaacacacgttgtgggattaatttcacgcatcaaaataattgaccggttaaatactaaacccagagggtaaaatcaatcgttatgtagtgaaaaatttgacgtacaccacaaaaaaagcaccgcgagggtgcttttttagcatttagtgcgaccgtaagccttactgttgcagttcttgttccgtgaacaaatctgcgaacaaagcggtgctcaaatagcgttcacccgaggaaggaagaataaccacaatttccttgtcagtaaagccagcttcttcagatagcttcactgcggcagcaacggctgcaccggaagaaataccggccagaatgccttcttcttccatcagcctgcgcgccatggcgatagcttcatcgttggtaatcagtgcaacacggtcgattaaggataaatccaggttgcctggaataaaaccggcgccgatgccttggattttgtgtggcccaggtttgatttcctgaccggccagcgcttgggtaattaccggggaatccgttggttctaccgctaccgtggtgatggctttgcctttggtttttttgatataacggctaacgccggtcaaagtgccgccggtgcccacgccagcaataaatacgtctacgccgccgtcggtatcttcccagatttccgggccggtagttttttcatggatttcagggttagcgggattatcgaactgttgcagaatcagataacgctgcgggtcggtagcctgaatctcttcagccttggcaatcgcacctttcatacctttcgcgccttcggtcagtaccaaattggcacctagcgctttcagcagtttacggcgttcaatactcatggtttcaggcatggttagcgtcagtttgtaaccacgagcggcggcaacgaaagctagcgccacgccggtgttaccgctggttggctcaacgagttcgatacccggcttcagcacgccacgtttttctgcgtcccaaatcatgtttgccccgatgcggcatttgacgctaaaacttgggttacgcgattcgacttttgccagaacacgaccgttgccgatacggttcagtctaactaacggcgtatggccgattgttaaagaattgtcttcatatatcttgctcatagcctgtcctttaactctatgaaaatgtaggaaacgttcaaagcatacgctaacaggtcggctatggaagtaaagaattggtatatctatatgtgattaggaaataagtttttccatcaatgaaaagggcgcgaaaaccgcgccctgacaggctttagcgactaggctgaacaaactggtgacggtaacgatccacccacatcgcggtggctccgcacacggcaacgggcataatcatcagattcagaaacggaatcatggtgaatacgctgaccaatgcgccaaactgcaaattatcgactttattttgccgtagggcgctgcgcatgtgctgaaagctcactttatggttatcaaaaggataatcacagtactggattgacagcatccaggcgctgaacaggaaccatagcaccggcgccgccgtctggcctatgccgggcaccagatacagcaacaacagcactaaggcacggggcaggtaatacatcagcttgcgccactctcgcgacataatgcgcggaatatctttaacgatgccgaggattccagtgtctggcagcggttttccggttagctcgccctctaaatgttcagcgagtaagccgttgaacggtgcagcaataaagttggctaccgtgctgaacaaatagctgaataccaagagcactgaaataaccatcactggccacaatagatagctgagccattgtagccagtccggcacgtagctcattaactgtggcacccaaacgctaattcgattaaacagccaccaaaaagcgccgcccatcagtaaaatgttgaccaatagtggcaaaataacgaagcgtctaatacctgggcgaataattaaccgccaaccttccacaaaatagtgaaagccgctggtggtttttgtgtctttttgcacgagtgacatgccttccatttctctgtaactgaatcgtccagcctatcatattgctatcaattttctctgcctagtgccatattggttaataaacgaacgaaatagctagcataatcatctttcttaacagaaaatcgagcacggacttgcacttgtgaacgttgagaaatagagttaaagggtgaatgtttgccgcggtggcaatgtattggaacaacagagatagtaatgatgcaggatttgcgtctgatattaatcgttgttggcgcgatcgccataatagcgttgttattgcatggtttatggaccagccgtaaagaacgctcttccctatttcgcgatcgcccagttaaacgtccgaaacaagaacgtgatgaaaccccgatcgagaccttcgatgaaggggttggagaagtgcgggtacggacttctcatccacaggataagccttcgttaagtcacgttgatgacaacgatgaggtgcctatcattcaacatactgagcctaaaccggcttcggtaaacgtagcgtctcgtcaagcgccggtagcccccgtgcagccagagtatgacgatccgttgctgggcggattctcgcctgaacaaccaccgcatgccacatcgggtgatccgctgttggggtcggcgactgaatcctattcagccccggaaccagcgccagaaccacagcacgttgagcctaagcaggctgaaccgcagcacgaacctgtagctgcatccgctccggaagtgaagcaagttgcgaaactgaaagaaacggtactggttctgcatgtttctgcccaccacggtggttctatcggcggcgaagtgctattgcaaagcgtattgcaggctggtttccagtttggcgaaatgggcattttccatcgtcatctcagcccggcaggcagtggcccagttctgttcagtttggcgaacatggtcaaaccgggatctttcgatcctgacaccatgtctgatttctcaacgcctggcgtctccatgtttatgatggtgccgtcttatggcgatgcgaatcaaaactttaagttgatgctgcaatcggctcagcgtattgccgatgacgtcggtggtgtggtgctggatgatgagcgtcgcatgatgacgccgcagaagctggagacctataaagcccgtatccgtgaagttctggatgcgactgccgaatagtaagcttagatagcgaaacgaattaacccgaacccccgcatgccgggggttttttatctttgatggtgggccatggaatcgataatccaacaacttaatcaactgcgagcctcactgcgccatcacgaacatcaatatcatgtgctggatgcgccagaaattcccgatgcagaatatgaccgtctgatgggcgaactgcgggagctggaagcgcaacaccccgaattgattaccgcagattctcctacccagcgtgtcggtgctgcacctctggatgcctttgatcaggtacgccacgaagtccctatgctgtctctggataacgtatttgatgaagaaagctatctggctttcaataaacgggttaatgaccggctgaaaatcgcagagccgctgaccttttgctgtgagctaaaattagacggtctggcggtcagtttgctgtatgaggacggcgagttagtccgcgctgctacccgtggtgatggtacgaccggtgagaatattaccgccaacgttcgcactattcgcgcgattcctttgcgtttgcacggtgacaatattccgcgtcgcgtggaagtccgtggcgaagtctttatgccgcaggcgggttttgaacaactgaacgaagaggcgcgacgtaaaggtggcaaaatttttgccaatccgcgtaacgccgccgctggctctttacggcagctcgatccgcgaattacggccaaacggccattaacctttttctgttatggcgtcggtttgatggacggcggcgaactgccccgtagccatttttcacgcttgcagcagtttaaagcctggggtttgccggtcagcgatcgcgtcaaactttgtaccggggctgaacaggttattgatttttatcatcaggttgagcaagatcgtgccactctggggtttgatatcgatggcgtagtgatcaaggttgactcgctggatttacaggaacaactgggctttgttgccagagcgccacgctgggcaaccgcgtttaaattcccggcgcaggaacaagttactcaggtccgcgaagtggagtttcaggttggccgcaccggtgctatcacgccggtagctcgtctggagccggtgcaggtggcgggggtgattgttagcaatgcgaccttgcataatgcagatgaaattgagcgtctgggtctgcgtattggcgataccgttattgtgcgtcgcgccggtgatgttattccgcaggtagtcggcgtggtgctggatgaacggccagccaatgcgcgggaagtgatattccccgatcgttgcccggtatgtggctctgatgtcgaacgcgttgaaggtgaagccgtggcgcgttgcaccggcggtttgttctgcgccgcgcagcgtaaagaagcgctgaagcacttcgtttctcgtcgcgcgttagacgtagacggtatgggcgataaaattatcgaacaattggtggagaaagaatatgtcaccaatccagccgatttgtttacgctgacggccggaaaactgaccggtttggatcgtatggggccaaaatcggcacagaatctggtcgccgccttggaaaaagccaaggaaactacctttgcccgcttcctctatgcattagggattcgtgaggttggtgaagcaactgctgccaatctggccgcgcacttccgcacgttggataatctgcgttcagcggatgttgaagcgctgaaagccgtaccggacgtgggtgaagtggtcgctaaacacgtgctgaatttcctatcggaagaacataaccagcaggttatctttcagcttgaacacgtggtgcgctggccggagccacagcggattattgcggaagagatcgacagtccttttgctggaaaaaccgtggtattgaccggctctctgaatattctttccagagatgaagccaaggatcgccttaccgcgttaggcgcgaaagttagcggcagcgtgtcgaagaaaaccgatttggtgatagccggtgaagccgcgggctcaaagctggcaaaagcgcaggaattgggcattaaggtgatcgatgaagccgagatgatccgtttgctgggcgaatcagaataaacctgaaacccgccgttgccgcggtgggtttggcctgaatggctgagaggtgtggagtagggtgtggaaaaagaaaacctgattgaaatagccaatacccgtatgccttttggcaaataccaagggcgagttttgatcgatttaccggaagaatacctattgtggtttgcccgtaaaggagagtttcctcagggtaaattgggcatgctgatggagctcacgatgacgatcaaaatggaagggctagaaggcctggttaaacctcttaaaaaagactgacataccatgatggcgacactatttttgcttcagtgctcgccatcattaattcatctatcttatccaacccattaagaaataaacgttaatctgactctgctccgtcgggcgattaatatcgtctccagccgttgggctgttgtcggggctgtctgattgctgcgtgttttccgcttctttagcctgaatccgggcgacttcggcctgcaatgtcttaattttatttggaatcagctgttgctgcttttacttttcatcggcgctgagatccgaatctttaatggtactgagcttttccgttaacgtccgaattagctaagttggcgcttttgcctgtgaggtattgcggttatcgctggaactggcgatggcagaggcggctgagatggtattcgacatttctattcttcaaaacagatagggaataaggcttattagggtttctgtctttaacggttgacgcggcttttacacaatcctttcactgactgaacgctggcttatcacacggtattattgggttatatttgataccagagaattgaacgtgcaaaagggcgggtagatgagcgcggggaaaatcccataaagctgcagagtccaaacgcaataaaaccagccataagctggtttacgcgtaaatgggtggaagcgggctaatacggcagccagtcgaattaagccttagacatagatattaatctgattgccagcgcgattttgcccatcgtcagcgccgacgcgggttttgttgacgctatctactgcggtcagggcgggtttgttactctgcgcatgggttgttttgatggcgagcagatcgtccttacccttttctgcctctttggcctgaattctggcaatttctgcatagagggctttgatctggttggaaatcaactgctgttgcttttgtatttcctctttcgataagccggagtcttttagctcggacaatttctccgtcagatcctgtatttgctggtgcagcgctttgatctgagattgggtgtcgctaccggtacctgaggtgctcgccttgttatgttgggctatttgcggtaacggggctgctgtagtaatagtattggacatccttttctcctaataatcatgtggggattaagaggtttatcggcataatcagctgattctttagtcagttgtcggatattcatatagcttgagactggccgctgtagaccaaacgcagtttaggccagaggcttagccaacctttatcggttactcgctgatgaaaggtcgccagatcgccgtttttatcattgaaagtaatcgttgaggtaaacaaagcctgtaaacccagaggcgcaatcaaagtgaggctatcatccgcttccagccgcactccgatagcggtttcgacctcgacccaatagctgattgcgtccgcggtgttcaaataagggggacggttgctgcgcaagtgcatacgcgcctgattttttaccgaccacggcagcggagattgcatcagaagctgcgcttctaactctttatcgcgctgtgggtgaatgttatcgcggtcaaagtagaccagatcgatatcattcagcgcagtgctgtcggcataatcctgcagccggtcccataccagattacgcacaaaaccggcagccaaacaccattggcttaatcctaattgacgggcatgacgtagggcttccatgcgttggctatcggactgtatccactcaataatttgctgttgctgaggcatagaaatccaaactgatttatctgatgaataagcgagaaatagcatgccagcccggaagggcgaataggtagcgaccggatcagttgttttttgaatagcagaaagcaaaagaccggccataggccggtcttttaaatggtggtggagctagacgggatcgaaccgtcgacctcttgcatgccatgcaagcgctctcccagctgagctatagccccacaaatgtggtgtagtactggaatttatactgaaaattatttgtaccgccaatcaaccttaattgcattcaatcaagcgaagtttggtggagctagacgggatcgaaccgtcgacctcttgcatgccatgcaagcgctctcccagctgagctatagccccaatgtacacataataaatcgtgtgaacggggcgcatgatatgaaaccgcagaaacagtgtcaacggctaattccatttctgtgtttaagcgctgaaaaagccgccaaatcagcataaaaagcacagaataatggatgacgtatcacagctttcacttttataaagatgaaaaaaagcggccaattcaggccgctgtgagactcgaaaaaacgaaagtcttactgttgcgcttcgcgttgagcgataaatgccagcgctttatcgatacgagatagcgaacgtgactgaccgatagcataaacggtgacgtccatgcctggggactgacctgcaccagtcacggctacacgcagtggcataccgactttgcccatacctacgccgaggtcgtctgcggtgctctgaatcgcatgatgaacgttttcagctgtccaatcggtaatggcagccagtttagcgcgtaccgcttccaatggctgacgagcaactggacgcaggtgttttttagccgcatctgcgtcaaactcgtcaaactcttcatagaaatagcggcaggattcggccatttctttcagtgtcttgcagcgttcgcccagcaatttaacgatttcaaccaactcagggccgttgcgggtatcaaaaccttgctgttcgatatgccaagccagatggactgccacctgctccggcggcagagtattaatgtaatgatggttcagccactgtagtttttccgtattgaaggcgctggcggacttactgatggcatccagagtgaagagttctttcatttcttcaacggagaaaatttcctgatcgccatgagaccagcccaagcgaaccagatagttcagcaaggcttctggcagatagccatcatcgcggtactgcataacgcccaccgcgccgtggcgtttggacagttttttaccgtcgtcgcccagaatcatggaaacgtgagcataaactggaaccggagcgcccagcgctttcagaatgttgatctggcgtggtgtattgttgatatggtcttcacctcggataacgtgggtgatttccatatcccagtcatcaataacaacgcagaagttataggtcggagaaccatcggtacggcgaatgattagatcatccagttcctggttgctgaattcgattggcccgcggattttgtcatcaaagataacggaaccttcctgcgggttacggaaacgcaccacgcatggctcatcggcgctgtgggtgcaatggctgtcgcggcagtggccgtcgtagcgaggtttttcgccgttagccatttgggtttcacgcagttcgtccagacgctctctggagcagtagcagcggtaggcggtgccgttttccagcatttgatcgattaccgcgttgtagcggtcaaaacgtttagtctggaagtatgggccttcatcccaatccaggttcaaccagttcatcccgtccataatggcgtcaatggcttcctgagtagagcgctccagatcggtgtcttctatacgcaatacaaattcaccacctaaatgacgagtgaataaccaggaatacaaggcggtacgtgcgccacctacgtggaggtagccggtaggactgggtgcaaaacgggttttgattttcattgggatcaagtgccttattacgctacgcctgtcggcagaggccgacgattgctcggaatttgaaaaaagtaggccacattctatcactctgccccaattcctcaacgccgttccggagtagactgatagtattcgtggtgtttatggctaaagaaacgtcaacgttggtgataaatatcgcatcctgtttaaaattgcggcgaacgattgttttcgttctaaaaagcgttgactcacttcgaactatccctataatgcgactccaacaacacggcggggcgattagctcagttggtagagcatctcctttacacggagggggtcatcagttcgaatctggtatcgcccaccaaactcgacgtgttagcagtaagaaatagaatgagatagatgagggcgattagctcagttggtagagcatctcctttacacggagggggtcatcagttcgaatctggtatcgcccaccactcatcactcattgagttgttcagcagtaccgttgtaagtaagaagtgggcgattagctcagttggtagagcatctcctttacacggagggggtcatcagttcgaatctggtatcgcccaccacttcttaagacttcgggtcgttagctcagttggtagagcagttgacttttaatcaattggtcgcaggttcgaatcccgcacgacccaccatctccttctcgcatcagtaaactccccaaaaaaataacatactgcacgattcgtgtgggtgagacctgcgttcaggctcgagccaagcaaagcacgcaccattcctatttccattttatctccgtcaaatttccctaaaaccgcggttttcagccataacgcttttgcctaggttcacttattgcgcttcgtatcctctaaatagcttgctgaaaaaacctcgcttatacgggtaaatagattatttcatgcgtataaagccagcagagaggctgacacagcgtaggttaacgaggagtacggaaataagccgagctttctcataaggcgcagggagcagtaagggcgcttaattcaatttaggggaagtgctgtggcgtaggatgttacggctgctgggcggctgataagatggctgggaaaaacggcgtgacatgttactgatgactgaaagattgaagaaactgtgggcataaaaaaaggcgctgcagcgcctttttcatcaaccgacttagattaaagcaccagaccagcaatagaggcggacagcacgctaaccagcgttgagccgtacagcagtttcaagccgaagcgtgaaaccacgttgccctgatgctcattcagccctttaatcgcaccggcaacaataccgatggatgaaaagttagcgaaagaaaccaggaatacggacaggataccgacgctgcgcggagacagttcggaagccactttttgtaagtccatcatggcaacaaattcgttagaaaccaatttggttgccatgatactaccgacctgcagcgcttcatgagttgggacgcccataacccaggcaaacgggaagaagacgtaacccagaataccctggaagctaataccaaatgcgaaggtgaacagggcgttaactgcagcgatcagcgcgataaaaccaatcagcatagcggcaacgataatcgcaaccttgaaaccggccaggatgtattcacccagcatttcaaagaagctttggccttcatgcagcgtacccagttgtagctcttcttcttcgcccactttgtatgggttaatcagtgacagcacgataaaggtactgaacatgttgagtaccagcgcggcgacaacaaatttagcatccagcatcgacatataagcaccaacgatcgacatggaaaccgtcgacatcgcagtggcagccatggtgtacatgcgtttttcagacatcttgcctaaaatgtctttataggcgataaagttttctgattgaccaaggatcagcgagctgacggcgttgaaagattccagcttacccatgccgttcactttagaaagcagggtaccgatcagacgaataaccacaggcaacactttgatatgttgcaaaataccgatcaacgcggaaatgaagacgatagggcaaagcactctcaggaagaagaaggccagacctttgtcacccatattgccgaaaacaaaatcggtaccggtcgcggcgaatccgagtaatttgtcgaagaaggcggcgaatcctttcacaaaacccaggcccacttccgaatgaaggaagaagtatgccaatagcacttcaataaccaataactgaatgacaaaccgaatgcggatgctcttgcggtctttacaaattagcagagccaaaatggctacgacgaccaaggccaacgcaaactgcagaatatgggacatgtgtgctccaaacttgaggcaggctagatttcggaggtcattttatgtaacgccaacattaaaaacgagacattgattgcaaatataaaaagtcacctgagtatttgcaattaaattaataggtttcgtcacaaaacgacgcatgttaaaaattttctttatttgtagcgtgatggtgctaatttgttgagagttcttgcgcaaaaagccgcagggtttagtgaatacaagcacagatttccagaaagtaaaacccggctattgaaacagcgatcttggcgggtggttattcagaaagattggctatcagagagataagttttaccaatgcaaatgcgcttgataattattatcatttagataatatgagatagacataatatctctaagggcaaaattgatatgatgaatagccgcgctaccgcttcagagggtcgtacatcaaggaaggtgaagctttccttgatggggccagcatttatcgcggctatcggttacatcgatcccggtaattttgctaccaatattcaggccggagcctcattcggttacaccctgctttgggtcgtggtgtgggccaatctgatggcaatgctgatccaactcctctccgcaaaactcggaattgctaccggtaaaaatttggcggaacatattcgagatcgttttccgcgtcctgctgtctgggcttattgggttcaggcagaaattatcgctatggcaacagatttagccgaatttattggggcggctataggatttaaattattgctcggggtgacgttattagaaggcgccatactcaccggtattgccactttcctcattctgatgctacaaaatcgcggacaaaaacccttggagctggtcattggtggcctgctggtgtttgtcgccgctgcttatattgtcgaactgatcttttcccaacctgaagttagcgccttgacgaagggaatgctgattcccaatttaccaaacggcgatgccgtatttttagccgctggagtcctgggggcgacgattatgccacacgttatttatcttcattcctccctgacgcaaaccggtggaaaggaatcaaaagccgatcgttatgcctcgaccaaactagacgtagccaccgccatgacgatcgcaggcttcgtgaatttagccatgatggcaacggcggcagccgcttttcattttaacggttatggcagtatcgccgaaattgaacaggcttatctcacgctgcaacctttattgggtcacggggcggcgacaatcttcggtctgagtctggttgccgccgggttgtcgtctaccgtggtaggcacgttggcgggacaggtagtgatgcaaggcttcgtccgtttctatattccgatttggatacgccgctgtatcactatgttgccatcatttgtggtgattatgatgggaatggatgcaacccgaatattggtgatgagccaggttttgctgagttttggcattgcgttggcgctagtgcctctgctgtcctttactggcaatcgggaattaatgggagaaatggttaattcccgtttggttcagaacattgggaaactgatcgtcgtggttgtggtggggctaaatctatatttactcattagtctggcttaataaaattcggataaccggcggattgttagtgaataccgccggtattgtttttaatcatcgtggtcgtgatgatggtggcgaccatgatgtttattctgttgttttttgtactttttatacgcgtgcttatcgtatttccaataacgcccatcgtggtaatagtagtttttcttccaccagtccttatctcgccagcgatggccgtcccagtaatggccgcgtcgactgcgttcacctacatcctgcccctgatgcccttgccaccattgacgatcgcgccagtcataaccatcccagtagttcccatttctatcctgttcgccgatctgtaaagagacgccaggaaggagattgatactgacggcctgcgcctgctgtgccaaaggtaatgtagccagcacgacaatcagcaataggggttttaacacgataatttccttctttatctgtcggttgtgataaaaactgagccgacagcgagtcacgcaatattaagatattaataaaataaatagaatctagcgttcagataaaactggaaaacaatgctttaggaattatctgcctgttcatcataaagatgaaggagggcggataattcgccctctggtgatgtgtaaagtgggaaagcgattacagcaggatggattctatacgcgctatctcctcaacactaaagtgagtattagtcagggcagttaccgcatcctcaatttgtgccgttttactggcgccaatcagcgcggaggtcactttgccctcacgcagcacccaagccaccgccatttgcgataacttttgcccgcgatccgctgctagatcgttgagttggcgtacttttgccagtttttcctcggtaatttgcgctggattaaggaatttactgccgctggcagcacgggaatcctgaggaatgccgttgagatagcgatctgtcagcagcccgcccgccagcggtgaaaaggcgatggagccgacgccaaattctgtcaggacatcctgcaaaccgtcctcgatccagcgttcgaacatagaatattttggctgatgaatcaggcaaggcgtaccaagggcttgcagaatagtcaaagcctgctgcgcctgttctgcggggtagttggatagcccgatatacagcgccttaccctgtcgtaccagcaaatccagcgctttcattgtctcctctaaaggcgtctgcggatcgggtcgatggtggtagaaaatatccacatagtctaatcccatgcgccgcaagctctgattcaggctggccaccagatacttcttcgaaccccagtcgccataagggccgggccacatggtgtaacccgctttagaggagataatcagctcatcacgataaggctgcagatcttgctgcaagattcggccaaaattctcttcggctgaacctggcggcggcccgtaattattcgccaaatcgaaatgggtaatcccatgatcgaaggcacagtgaatcagatttcggctgttttcaaacagtgttgcatcgccgaagttatgccataagccgagagaaatagccgatagttttaaaccgctgtgaccacagcgccgatactccatgtcttgatagcggatagggttagcttggtaaaccatgacaatccttaagaggaatagggcagataaatgagtgtaagccttttcactcattcggttcgccagcgggatcacaaggcccataaagtcacgaaatatttacagtgcaggattgctattaattctaacgcattagataaatttaattattagctaatactttgcttatgaactttttatatgttggtttttttcctaaggatcacgcgcgctatgaaaagtagtgtttataaagttgccgattatttgctggatcgcttggcgcaaattggaatcaaacacctgtttggcgtgccgggggattacaatctccagtttttggatcatgtcatcgctcacccgcagattgactgggtgggatgtgcgaacgaactcaatgcggcctatgctgcagatggttatgcgcgtactcagcctgctgccgcgttgctcaccaccatgggcgtgggcgaattaagcgctatcaacggcattgcggggagttttgccgaattcttgccggtgatccacatcgtcgggatgccggcacagcactcccagcaaaagaaagagctgatacaccactctctcggtgatggtgattttagccacttttcgactatggctgaaatggttagctgcgctcaggccaatctcacgttgaccaacgctgccagcgaaatagatagagtagtggcagctgcgcttgctcaacgcaaaccggtttatttacaacttccttccgatgtggcagagatgccgatcgacgccaaacccaattcgctggcgtttcaacaagcgccgtactcatctcagtcattgcgggattttatcgacgcggcgagagagtcacttgcttcagctcgccatgtggctgtattggcagattttttagtggatcgctttggcgctacccagcaattaagaaattggctaagccaaactcatttaccctatgcgacattactgatggggaaaggtattgtagatgaatctcgcgcagagtttattggtacttacagcgcagcacccagtgatgagcggattagattaacgattgaaggagcggatgtagttattaccgttggcgtatggtttgtcgacaccataaccgccggatttagtcagcaaatttgtacggaaagacgcattgatatctgccctttcgaagccaaagtgggttcgcgtgtatttagccaaatcccgatgactatagccattgatgcgctggcaaaactgagcctggaattacagcatgaatggatacagcccgatgtttaccattgcccgttgccgccttctttagcacaacatctggatcagcaaacattttggtatcacattcagacgtttttgcggccctttgatattgtgctggccgatcagggtacggcttgctttggtgccgcagctctgagattgcccaaggatgcgatatttattacccaatcgctgtggggctccatcggatttagcttgccggcggcctatggcgtgcaaaccggcaatccgcagcgtcgagtcattttactgattggggacggtgccgctcagttaagcattcaggaactgggatcaatgctgcgggatgggttaaaacccattattctcttgttgaataacaatggctacaccgtagaaagagctattcacggcgaaaatcaaccctataacgatatatctacatggaattggactcagttaccgcaggcgtttggggcgggtagcgaagtcatatccctgaaagtgagtgagccagagcaattacataaagcattgcaattggctgatcaaaactcgcagctagtatttatcgaagttgttctaccgcagatggatatatcaccactgctgaggaaagttacggaatctctgcgaaacagaaacgcctcaacttgatatccgtggtgattggctgcccgtaagctgttctaacagccagaaaccggctggtcccggcgggttttttttcgaccataccgcatccagagaaatcatttttggccaaccaaccgcagagagctcaaccaattgattacggctgaattgtttcaccatccaacgtggcaggattgcccagccaaagccctgctccgccatttctaacagcattaaatagcttggcgctgaccaaaccggcccttgagccgtatttttatctgtttgcgcataggtgttcagacgcagttgccgcacggtggccagttgttcaggttggatttgttggcactgagctagcggatgattctgttggacaaacagcgccatacaggactgttctggcagaaggctgacgccaatatctggcgggtaatctttttggacttcaaccatacccaaatgagcgcgaccatcttgcagtaacccaataacatcatcggcctcagcaatcatgcattcgaattcaatatcaggatagcgctgctcaaaacgttgcattagagcttcgtggtgagtgggttgatatatatctgagagtacaaaactaagacgaggctctactttatccgccaagcgaatagaaagatgatccaaacgctcgctggcagccaaaatttcctgaacctgcgccagaacgcgacgcccgtgagccgtgagcaccggctggcgtgcttgccgatcgaacaagactaaccccaaatctgcttccaaattggcaattgcagtgctgatggtggactgacttttacgcagtttacgagcggcagcagaaaaagatccctgagatgcggcttcgacgaatgcaattaacgcttccggtgaatagtgcattatctatctacttaatcgatggcttctatttttaatctatcccaaaaagcgatgataatcactcggtagtttttaattcatcaaaaaaacaggtcgattttatgcaagctaatcgtaaatcattcgttgaacgtattattcacgccgtggggttcgaagttatcgccgtcggcatttgtgcgccgctgggcgcttggttattaaaccgttcggttctgcaaatcgggacattagcggtaatgctatcgacggtcgccatgctgtggaacatcatctataacagtatctttgaccgaatctggcctgtgagccgcgtagcaaagacgctggcggtgcgtatctggcacgcttttggttttgaggccgggtttgtattgatcggcgtgcctattgcggcctggctgctggggatttcctggggacaggcttttatgctggagatcggcttcttcctgtttttcctaccttacaccatggcatataactggctttacgacacgctgagagcgcgagtgattgcttctcgtcatcaggcaaaagaaaaaacggctgcgtgtcagagtaacggtcaggattaaggggcgtaaaatgcgggaagcaaatgcgaaattatgcggtgtttctccatgctgaaacgtttttttgtgatccgtatcgctaaagacgcggtgtttagcccgtggtgattgttgtttttctgccgtgattttacagtaggtgcagttaactcaattagttaaatatccatttaacggagaagtatttgatgacgacctatgctttggtgggtgatgttggcgggactaatgcccgtttggcgctgtgcgctgtagcaacgggcgaaatatctcaggcgaaaacctattcagggcttgaatttgacagtctcgaagaagttatccgccagtatctggcggagcataatgttgcggtagaagacgcctgtcttgccattgcttgcccgattaccggtgattgggtggccatgacaaatcatacctgggcgttttccattgccgaaatgcaaagaaatcttgatctgagtaagctggaaattatcaatgattttactgcggtatcaatggcgatacctatgctttcaccgcaggatgttatccagttcggtggcaaagataagcagccgggcaaaccggtagcggtatacggcgcgggaacaggcttaggtgtggctcatttggttcatgtcgatcgccgttggttgagcctgccgggagaaggcggccatgtggattttgcgccaaacagcgaagaagaagattgcattttggcggtattgcggaaggaattagggcatgtttccgttgaacgcgtgctttccgggccgggtttggtgaatttatatcgcggaatcgtgatttctgaccatcgtgtgccggaaaatctggctccgaaggatgtcaccgaacgagcgctggcagatagctgtaccgattgtcgccgggcgctgtcgctattttgcgtgattatgggacgttttggcggcaatctggcgctgaatctcagcacctttggcggcgtttatattgccggaggcatagttccacgttttatggagttctttaaagcgtcgggattccgcggagcgtttgaagataaggggcgctttaaagattttctcgtcgatataccggtttatatgatcacccatcaacagccgggcttgctaggcgccggtgcctatttgcgccagacattaggtatggaactgtagttacattaacaaacgcctattatttgaaaggttaataaggcgttttttttaaagttctgtttagccatattttggataatgacggtaactgtaaaattttttgcagctgccggtctagttgctggcattaataacaggaactttatccatgacaataagtaacataaataccagcagcccctcccctctaatgaatctcccgacaaaaaataacttatataaaaggatagaaacgttaggtcaggaagtgaagaaaattaaaaatgagttgtctactattaaagtgcagattaatgaggggaaaagggcgattaggagtaacaatatcctgctaaaaagcctcacgggtatttcaaacaagcatggcgatgatgtgaatgtgcgcttgaaaaacggcagtgtaaagttcggccaaggtagcaattttttgaaaaactttgtttctggtagccgttatcaagctgagcgacaagaagccgctaaatattttggcgcggagggatgcgaagtctctgctgctgatggtatctctaagcttaaccaaaaaattaatattataaaaagtgcgctgcttgggctggaagagaataaaggattacaggaggccaaacttgaaggagtcaatgataagaagcatcgggtagatcaacaattacaacaaattgttgcggctgaggctaaggtaagaaaagccgatgaagctaatcaaaaaatccgtaatgacttttctatggtttatcaaagtaatgcaggctgtaaggctttaaatgttgaggctcgctaccagttcggccaagggcgctcgcccggtagtctaagcggtagtaaagtcattgccgagtatgaaagagtgcatggtgataatatcttcggccgaggcaacaaaaatcttaaaactacactcaaatttaattgttcggatttggctcaattagtcaaaactggagccaaagcgtggtatacgccaactagcaaaaatattattacgcatcgtggacaaggaataaccagcgcagggattaataaattaattagccaattcaatagcgataaaactcaaaatcaaaccactacttattcactagggcagttcttttctacctccggtgataaaaaggtcgcacaagattttgccaaccgtagccaggatagtgaaagagtgatgtttgaagttaagggcaacagtggtaggggcatttttgtatccggtggtttagcattcgagaataacgagcacgaagtattgtattcgccattagcaaatttcaaagtgacgtctattacgcaaaataatatgggtacttatcacgttaaacttagcgaagttgagcaaaataaaaaagcgagattattaccttactaagtttgtcactgatcaacgctctgattctgataaacccaaatgcctaccaactcttaggcttttcgccaagtattggtaggcattgatttggtctcacttaattcttatcaacctatcaacctattaagcatggctgctggcggtaatacccgtcggttcttcttttggctcttccatctgttttgccgaacctttcggtggtttgataatgagagttaacagtagggaaagcactgacatcacggcaatcacgataaaggtggcgtggaatccacccagacgggcggcgataaatgaacccgccagcgcccctaaaccaaagccttggtagataatgccatagtttttactgtggtttttcagtccgaagaagtcaccgacaatggccgggaatacggtgatattgccgccgaaacagaaggcaatggcacctacgcacaggaagaagagggcgtgagtcaaaggaacgaagcttagaacgcaaactgccagcgtagtgactaacaaagtgaaggtaatcactcgcatacgcccgactttatcagacagcgcgcccagaataatgcggccagcggtgttgaaaatagcgatggcagatacggtattagccgcggtggctaaatccattcccgctaattcgacgcccaaatccttcacgataccaatcagatacaatccactcatacatgcggtgaagaagatgatgaacaggaaataagattctttcactgccagcatttcttttacgctgaaatcacggccattctggctggcttgctgcatattggttggttgtggagcgctgactttttctttcagcaacagggagcctacgccgaccagagccatcacgataagaccccagtagaagaaggccagagagacgccctgattggcaatcaggctggcattgacgtatttgaatagcaggctaccggtaccgaatgcgccaacggaaataccggctatcaggcccttacgctcagggaaccatttaattagattagaaagtgttgtgatatatgcggtgccatcggcaaaaccgacgacgacaccagccagaagataaatcatgccaagggaagtggcgaaggagctggctatcagccccaaacccagaatcaggccggatatcaaagtcagattgcgaatgccgaaacgttcctgcaagcgacctgcaaatagcgtggcaatagccaaagagaaactggtgattgaaaaggtggtggcaactgcgccgagtgaccaactgaatttttcacccagcggctggttgaataggctccatgtataaatagtgcccaaacccatttggacaatgatagtacctacaacgattagccaacgatttaccggtttgctgctcatgccggactccttaacatcaatacaacctggcccgaataattcggtctgccataaaattacgagctgatgattgacgaaggatttggatgttaagtcactatcagcccgcccaatgaagccagtatacgggcgggtttaccatgaaagatcaaatgaggaatgagctgcattcagcacggaatgaaatgcatctataggcgcatcaactgcctgaactcttttaccttgctgcggctgacgggcacttcaaaatccaaatcactgagacgcaggatgtaagtattgttaaaccagggcacgatttcgcgaattttggacaggttaacgcagtaagaacggtggcagcggaagaagtactcctctggcagtcggctgaagaattcagtgatattcatcggcatgatgaactcttcccggcgggtgtaaaccagagtcactttttcctgcgctgcggcgtaataaatatcgttgatatccgtcactatgatgcgttcgtctttcatcagattgatggtatgagcgctgcgcggtgccagaccggtgggttgctcgttttcctgacggttacgcttatgcagcgcttccagtttttgcagcatggtgacaattcgggattcgtgatatggcttgagaatataatcaaatgcttctatttcaaaagcttccaccgcgtgctctttataggcagtgataaagataatatgcggtttatgggtaaatttgctgatattttgtgccagcagcacgccatccaacgacggaatgtttatatccagaaaaatagcatcaacctgatgattttggagatattttaatacatctaatccgtcatcaaaggttgcttctatggtgataccactgtgctggcgaatgagatagctcagttcttcctgagcaagaaactcatcttccacaataatggctttcatgaatattgctccgggtagactggcggtgaagttgaattatgcatgaacttttccgccatttttgctgataaagaatgaaatctcggtgcctggctctaaacgtcgaatttgtaagcctgcaccgtataacaattgcacacggtgatgcacattcagtaggcctattttgttacctggcatttcattattggccaccctgtctatggtctcctgattaatgccattaccggtgtctttaactgaaattttaatttgatctccatgatctttcactgcaataacgaccacgcctttgcctttgcaaggctgaattccatgcacaatggcgttttccaccagaggttgaattaacaggctgggaattcgcagtgaaatatcatcgtcgatatcataaataaccgtcagtttgctgccgaaacgagcctgttcaatagcaatataatcctgtatctgatgtagctctttgcgaatatctatctgttcgtcattcagttcgaggttataacgcaaataacgagacagattgatgatcaactgtcgagcggtatctggattgatccgaatcgaggaggagatagcattcagcgcattaaacaggaagtgaggattgattttactttgcaatgcgcgcatttctgctttatttgccatttccttcagctgttcaatacgtgagacttccatttgcgtagagataatttgcgataggccgaccgccatcactttcagtgaataggtaattttatgagcatggcagtaataaatttttagcgatccggttacttcacctttttcccacagagggatgataatcagcgaatgaatttgcggcgtacggtgaacctcatcgttattacgaatagtaattttgccacgctgaatgctctccttagtgatatcgctaataatttcgtgtccaatatcataggtctcggcaccgacgccaacgtaggccagaatattgtgagtattggtaatggctaccgcatctgcttttatatcggtgcggataatttcacacacggtgctcagtgattccccgttgatatttcggaagtagggcagcgttttattggcgatatccaaagccagtttcgcctgccgagcggcaatcacctctttttcatcctcaacgctttgtaccagcaacacaatcaggccgatacacactgcgcctaaaatcatcggaatcgcgattttcgatacaatatcgatacccagcgccgtcggtttggcccatgccacaaccaaaagcatagtgagcgattcgcagatcatgccgccgagaataccaatgctccattggcgttcttttttcaccttcaaattgatataaccagacatcaacccggcaataatgctggtgataagacagggaacagaagtaatgccatcgatatcaattaaatagcgatggctaccggcaataataccggtgatgatgccgacccaggggccaaatagaataccgccagacattacggcaataacccgaacgttaactagcgatccttcgacgttaatacctgagtaggtaccaaagatggcgaacagagagaaaatagcggttaccgcgagcagttccagcggcgtgtgtttctctttttgtagtagctgacggaacaggcgggtgcgggtcaggaaaaacaggcagatcaacattagcgcggcgcgatcaaaaaccgccagcaacatttcaaatatttggtgcacaacaggctcgtttgcgggtgaatatcggctcactataaggaaaaacggcttttatcgctactttaaccgtgttttttaccgcagcagaactgaagcaattcagtcggaaaaacgagtcttccgactgatcattatctggcgggaggattactgttcgaagcagagctgttgttttcctaatggcgtcaaatcttcaaccgtggctctgccgatgaaatcgacttcaaaatcatcagcggcgaaatccggtggcgatttaccgtcgataaagctggccagttgacgcggtaaataagtggcatttttctcacaccagggagccgcagcgatatacatcacattactgtcaaattcaccgttgtgttcattttccactgagtgaataacgtcgcaatgccagaacaccgtatcaccagcctctagatcgggaataggggaaatggcttcgagtaaaagaggatgccattgttccgatgctgaaagcgctcgacccggcattgcaccgcataagtcatcttctgcgacatcatcttgtaacgcgcgcagcagaatgtaggccatggcgttggcaatcgggatgacattcagcgtgcctgcatgggttcgctgcggggttaacgccgtccacccctgaaaggttcggaacatagagcacactgccggcgatggaagctcacgtacttccggtctgccttctgcggcgaaaggatcatatttttgccattcgccggaaaatacgtggcggtaaacgtggcggaaattttcatccagccagcgctcaatggagccgccgtcaacgtgaggcgataagcccagtgaagatgaatgcggcggccggcggcgggtgcggtcggcgtaagtgactacgcggtcaggatcaaagtgatgtttgccgttactttcgctgtgccataggttattgagaaacacctgaaccgcctgcatccgatgatcctgtcgggcttccacctgaggtttggaccaatagatcccataaatctgcggcttattggccgctaaagtgccgaaataattgtcttcggcggcgtttttcaaacgctcaacaaagttgtttcgctctaaatactggccgatttcccgattccaattctcggctttttctcgtgggaatacgccgtgaatggcgcaggttccccgctgttttatcagttttttttgttgctcggtcacgcggttatggatgatatcgtcagcgtgtaagcgcggcaccgggttttcgcccgcagctaaactttgacgaatagtgtttacctgttgacgaatgttttcctcaacggcgagaaaaacttgctgataatcaggtaaatcctggcgtagctgacgtttgactagcttgattgccgctggaatatcatctatttgtaatgaagacatattttatctctccgacgtactgagacaggggaaacggggcaataggtaaatctgggaaaaataaagccaccgagatgttctacatttgttaaattcatgtggctattatttcggcaaaatagagaagaataaagggatgatgttaggaaaaaatctcccctttattttgtgatttatcccgaccaaacagttgagaaaataatgattcatatcgctaccgaacgattaacgttgagcacgatgacagaacaggattggccacttttttcacggctatatcaggacccggaggtgattcgctatatttccgatccgcaggatctcgtcaccattcagacgcgttttgctgttcgcgtgcagccttgggacaggacttcagaccattggctgtgtttggttattcgcgaaaaagcatcggggcaacctgttggtatcacgggatttttaccggaatggcagccttttcagcaagcggaggtcggctatggcttattacctgaatttaccggcaaaggttatggtcaggaatcgctggtggcggtgctggaatttgcttttcagcaatgtcagtttcataaagtgaaagcgacggtaacggtaggtaatcagccttcccgcgccttgctggagcgctgtggttttcaactggaaggaaccttaagagacaatttcagcctcagtgggaaatggtgcgatgactgggtactgggattgctggccgatgagtttgctgcgagaaaaaatgcgttgttactttgaggtaaaataatttcgttagcctctcgacagtatttcagcgctgcgatatgttcttaaaagacccgtgatggtctgcgtcgctcggacggtccgggcgctaacgtatcctcgaggaaattatggctgaattaccatccaaacgtcgttttacccgcattgatcgcctcccaccctatgtttttaatattacttctgagctaaagatggctgcgcgccgccgtggcgaagacattattgatttcagtatgggtaatccggatgggccaacgccgccgcatattgtagaaaaatgtgtagcgttgctcaacgtgaagatactcacggctattccacttcgcgcggtattccgcgtttgcgtcgcgccatttctcgttggtacgccgatcgttatcaggttgatatcgatccggaaagtgaagctatcgtgaccattggttctaaagaagggttggcgcatttgatgctggcaacgttggatcacggtgataccgttttggtaccgaatccaagctatcccattcatatttatggcgcagtgattgcgggcgcgcaggtgcgctcagttccactgacagagggtattgatttcttcggtgaattagaaagggcgattcgtgaaaccattcctaagcctaaaatgatgattttaggcttcccatcaaatcccacggcacagtgcgtcgaactggacttttttgagcgagtggttgggttagccaaacagtatgatgtgctggtggtgcatgacttagcctatgcagatattgtttatgacggctggaaggccccttcgatcatgcaagtaccgggtgcaaaagacattgcggtagaatttttcaccctatcgaaaagctataacatggccggttggcgtattggctttatggtcggaaatcccgaattggtcagtgcgctggcgcgaatcaaaagttaccacgattacggtacttttactccgttgcaggtagctgccattgctgccctggaaggggatcagcagtgtgtgaaggacattgccgaacagtaccgtcagcgccgtaatgcattggtaaaaggcctgcatgaagctggctggatggtagaaaatccgaaagcgtcaatgtacgtttgggcgaaaattcctgagccttatgcgcatctaggttcgcttgagtttgccaagcgcttgttgtcggaagcgaaagtctgcgtttctccgggaattggctttggtgattatggcgatacccacgtgcgtttcgcgctaatcgagaatcaggatcgcatccggcaggcggtacgcgggattaaaagtatgtttcgcgttgatggcttaattaaaccgactaaactggccaacggcgaataagattagccactcactagccgggctgattttattacccggttagtgtttcttgctgcaaatatagctttttcaataagctgaatgagcctcttaaggttagcttcatcaaaattgcgccatactcttagctaaatagtttttgacgtaagacttttgtggagcatcacaatgaagaatcgctattctctgtctcaaattactctgcactggctaacgctattaatggtgattttgacctattcagcgatattgctcagcgacgtcgttcctgatgaagatcggacgctagtaaagaatctgcactttaattttggccttagtgtctgggtattgatgttattgcggctttggctacgccaacgtaactcttctccggttgttactccgtcattaccaaagtggcaggctgttagcgcccatgcattacattggctgatatacctgatgtttttgtcgttaccgatattaggcgtgctggctcaggcctacggcggcaaaacctggtatttactgggctggcaagtgccacagtgggttatgcctaattctcaggccagatcgttaattaaacaggcccatgagcttattgctactctgggatattttgttatcggactgcatacgctggcggcgctatatcatcactatattcggcgtgatgacacgctacgtagaatgatgccgggaaaataaaatgacaaagggcgcggatgcgcccttatatgccgcaaaaggcggcggggttactctaccattaacatgaaggtgccaatccaaaccaccaacatgaaagagatacccataaagaaatatttcactgaacaactccccttggagctacctcgccagcaatgatccaacttgttgtgcagagtctgaaaagtagataagtatcgccccagcctagttgaagccgtatggttaccaagacagctcactcgctcggatctatctaaaatgccggtctgtcactttgactacggcaggatcgcgctaatgtaatcccataactagggagatatcaatactgtatttttatgcacccgatcacagttataggatttttacacaatttattaaggttatttatctgaaacgtgatggaaataacgattttttaaattttagataaataacaaattgttaccttctttcttttcaatcactctatagattcaatttttctgactaccacatgggcttcgtagcccagcaaatacaaagcctgctccagtgcctcgactttagatgcgtagtccacgtctaacaaacgctccatctgagcagcattcaggccaagtttccgcgctagatcggctttgcgagtgccgctggcgatcattccgttatgtaactcggcttttaatgtgaccaatatcggtaaatgtaccgaaaattcattgtcttctggcattgatggcgcgggaatagagcgtctttcttccatttccaccgcaatcgcggttttaagactatcttgagcttctagctctacatcctcaatagaataggtaacggactgtacttcaggaaaatcgcgaaaatgaatttgatattcgccgctggtttcatcaaaaaggtaactggctggataactgaacacggcgcgtactcctgtagagagaagtctatctaacatagagtagaaagacttctttcttacggtaatgggaaaaatgctatttagaattatatcttacaatcatcaaatatctcacataatgagatgagttcagatgtttttttgttaataaaaaagtctaatcgctcaccgggtttggctatcacagtatttgctttaccattatgcataaccccgccaaattgttgcctaaatcctacgttctctatatcgcgattattcgttatgtcagatattttacttaacgggatacggctattgcaaaatgcagagtcatttgacgaataaataatagtatcgtacttttcttgcaataaatttattctttgatcatcaagtgattcgttctcacatgtatcataatttatattttctactattttttttgaatttttgtcgtaagcaaagaatgtaacaccacgaagtataggtgtaggtaatttttcatattttataccggtttctcccgatgagctgaccgaaacaccaatgaattcgttattaaatataatggacttttgcggtttttcttctaacttaatggagccatcatagctaatgattttcttcttaatatttttatctgataggatatacagacatactttatttttaatgttattgactgcctcacattgagtcacatacataagtttactattttcttttaccgcatcgattacatcgagagcaaatgtattaaaataaacacttttaatgttatttttattatccagactagccaacattggcagtttgaatgagctgtttgatatattaatcacatttccatcagaggaaatactactatctatattaggataggcccacatatttgctgaatatgcaagaaatggatttatattattgttctcatcatgatattgattaatctcacttcgttctttttttaataggttccgaccaaaacctacatcagtgtttttttcaccagacacggcaaggatagttggccatacatctagcaatgtgccctggttagtgatttttcttccagagatatcttttttaattataataaaattatttcttctatcgctatcatgtctgttcaatatatggctaatatcattagccatcatgtaatgatctgaaaccaaaacaataatagttttgtcggcatactgggatgacataactctttttataaattggcttagtaaataatcagagcaagatactgcttttaacatgggttcagttatattttcagagattttcccatcacatacaggcaaaaattgccctgacggagcatgggtatttactgttaagaatgacaacatgaaattctgtttttcggctgagagcctttcaaactcattgtaagcatgttcaataagtatatcgtcatgaactccccagccattcatgagtgtttcgtctgcaagcccgttctctacgaaatattctttatcaaatatgttgttccaaccatgctgactcaggaatttatcgccacctgcgaattccttatcactcccgcgaataaactcattagtatatcctttgctttgaagatattcacctatgcagcttgctgagctaagaaactttgacattgatgaagcagaattaccttgaggcagtgtgaatgggatgccacattgagtatttactaaacccgccattgtccagccgctaccttcatgttgccggatatcggtgaaatctagcgattcattggctatttttgtaatctcaggtagataattaataccatcaaggtttctaaatgtatgttctaagctttcagcgtaaataaatacaaagttgtatttatttcttaattctgcattgggctttttataatatgatgtagcgaattcactatccccataattaaggttttttaatgaggatattacatttttcgcagatgtagagtttgtgataaagagtaatgttccaaaagcaaacgcgacatcaaataatttacgtcttgttatttttcttttctttgaaattattgcaaatgtaattatggctataggagtaaaagaaaataaaatagcaaaggcaatgtttgactttatatcatttaaagatgttccttttacaccgctaagcaaatggtaataaacggagtcagttacaccgttgccagtaaatcggtcacaaacaaaccagaatccgaatattattacacataacgaaagtgctatagctttcgttacgatgaaattctgagatttgaacattaaaattagtaatgtagataataagatataatccatgttgcccactaatatattaaaaagtcatatagtaatatttttatataattttttattttaattaattaataataattaggcaacaattaagttgtcattgttgaagttattctgatcacgacaattagaatcttgaaattaatgcctttaaaaagttatatttatcaatgtgataagcaggatttgtttgtggtgggcagcttgagatgagattttatggctgatgctgaatgaatgaaataaagaaatggtggcccgattttacaggttgttctctatccgaaaaattgctgctctctaagatacggggatatattgcaattgcatgattattatggtttttttgttttttaaggcaggttgttttcccccttcggtcaggttggttttctgtatcggtaactcaatttctatatttatttttaagcctaccggggggaatataactcagagcacggctttggagcgttcgcgcccttgggtacaggatagcgtggtgatatcgctatgtttaccagcatgatagatatttcctgctggaaaaatggctgctacaaatatgatttttaatccctttccccatagcactagagcaattgcgtagaatctgtatgcattcttcaccgttccaatcgtgcagaatatatttcagcaaatagaagccatggcctgatggaatagactcaaagaaatttccagcgccaatcgtgcattgggaagccatatttttgtgtctgatgattttcgcgattttctcagctacagaaggactataaaaaataaccccgacgggattcatgttagttgccaggatggttaacattaatgctccattgccgtctccgctatctataattctattgtaatcgttaaaattatagactggagttactttctgaacgaaatgttgggtcaggtcagccatatcattattaaatttatctgcctgctcgggatacaggtcgtagtgttaccatatatctaattgataatgtggttccaggttacttttctctcggttataccttattgaaacgaagagaaaacaaaggataattctcccatcattgccagcagaaaaggtttaatgttgccaatagtatttttatctaaatccgccgctgggataaattaaaaaattttctcgctcatcatattcccgttaacttcccagaaaatgcctccggcagccagcagccttaatcatcgatatgaatattctgatttcactccggttattttgccggttcgacaacgcttttaggatattaaaagagtcattctgcaacatttagtttggccgtaacctgagcacgtgggctaattgataaccatatacgatttcccaaacctgtttggatgactcgggagaaaatcttggtttcagcataatattttggtcgcagcaagagataacacaagtatagttaatgaatagagagcgcttctgtgggcgctgctcagaatttagttctttcaacggaatattttgatcttcacgttagcccgcatcttggcagttatgttcatattttgtggcttagtcaggtttatctgaagctgataacataatttcattcatgattggctgatacccatatgattcctgtttgttcgcggcgaacaatgtcttaccatagcgatcactttttcttatatgactgtgtggataaccgatgcgttattgggctgctattttacctatgcttactttgctgaccgcctgtagcaatcaaccgacacctttagccacggcatctcagaagggaggttttcttctggaaccagcgcatacaggtcatatgctaagtggtgatttcgcgactaacccggcggcaaaccgttttgtcgataaaatggtgcgagaacatgattttgaccgtcagcaattacatgatgtattagctcaagctcaacaattggattgggttattcgtttgatggataaacaggcacccaccagccggccaccgtctggccctaatggtgcttggaatcgctatcgcaaccagtttattacaccggataacctacaaaatggcatagctttctggaatcaatatcaagatgcgttgcagcgagcttatgaagtttacggcgttcctccagagatcattgttggcattatcggggtggaaacccgctggggtcgcgtaatgggtaaaacccgcattattgatgctttggctacgttgtcattcagttatccgcgccgcgcagaattctttagcggcgagctggaaaccttcctgctaatggcgcgtaaagagggtaacgatccgctttccctgaaagggtcttacgccggagccatgggttacggtcagtttatgccgtcatctttcaagagctatgcggttgattttgatgaaaatggccataccaatctttgggatcccgttgacgccatcggtagcgtggccaactattttaaagcccacggctggcagaaaggtggcaaagttgccgttcaggctatcgggcaggctcctgggctagataatggatttaaaacccgatattccgttgctactttagccgcagcggggctacagccaagggattctctcgatggctatcaggaggccagcctgctgcgccttgatgttggcaccggctatcaatactggtatggattacccaatttctacaccattactcgttataaccatagcactcattatgcgatggccgtttggcagttaggcgaggcggttggccgcgcgcgccaaggctattaagcttattgctatcggttaacacgttgaatattgggctattcattacgtattgacgaaggttttattgactatttgtgggtcgcttcggcgacccatttttatctatttagctccaaggtaatatgtatatccgtactcttattcatgtttattcgtgagtttgctggtctccgataggataaaaagtgtaaaatacaggcttacaaaggtcatagcctttaatttaacgtattttaaaatttattctatttagtattaaggggttatcgtgacagcattacctaattgtccaaagtgtagttccgaatttacctggcagaacggtgagcagcttaactgccctgagtgcggccatgaatggtctgaaaatggcaatgtggctgaggatgaagaaggcctggttgtgcgcgatgccaacggtaatttgttggcagatggcgatgcggtaaccgtcattaaagatttgaaagtgaaaggcagctcttcaactctgaaaatcggtaccaaagtaaaaagcatccgtttagttgaaggcgatcataatattgattgtaaaatcgatggctttggtccgatgaagttgaaatcagagttcgtaaaaaaagctgattaacagagatttagagtaatacggctgataacgggcagtttttatgatttatcggccattttctttaaccattggataaaaacgttaatttttggccactggcgttctgataacgtcgaaatgtaatagcgctgttcgcataccacttccatccctgggaagggcataatcaactcctgatttgccagacgacgcgctaccagtttttttctccccatggcgatacccacgtggttgattgctgcgagaatggctaaatcagaacgatcaaatcccatactgcgctgtgtggtatccagcgtaactccggttcgtcggctccaatcctgccattcactgatatccgagtcccggctccatgcctgtcgatcgtgtagaagcgtacattggcgtagattgatcaaatttccataaagctgatgtttttccgcatattctgggctacacactggcaccattgactcatccatcaggtgttcatacgacaacttttccggcgttttatcatcgtagtaaatggccagatctatgccaccgccgagaaaattgacgttgtcatttccggtcataatattcaggttgatggccggataatgatgagcaaaatcagcgagtttaggcaccagccagcattgggcaatcgacgggcgagaatagactgtaagagtgccggataactcctgatttttaatttctagaacttcctgattaaggtaatcaagggaggatttcagcgcccaaaatacccgttcgccttcactggttaactcaattctccggtgaaaccgctggaataatttaaaccccaattcatcttcgaggccatttatacgatggcttacggcgctgggactaattgataactcattggccgctaaggcaaaagatttatgccgagccgcaacttcaaacgtatagagttttgatagctgatagccattaagaagttgattgcggtggatataggcgttttccgggtacataggggatctgctcactttattttgtctaaatattataccgatttacattttcactacatgataagggttagttaatgtgattcaaatcgtacttatatcgtaaaatatgacctatttggcatatttgatccaatatggctcatctgaaagcgtttttttatcgtttgtcagcccctatcaactcttattcaataaagccacaagaaaactattggttgaggttggatatggactcacaaatatgggtagtggggacgttattaacaagtatcatcattattatattcgccatagtaaaactaaagattcacccttttctggcgctattgttagccagtttttatgtcggcctgttaatgggtatgaacccactggaaatggttaactccattgaaagcggaatcggcggcacactaggatttttagcagctgttattggtttaggcaccatcttaggcaagatgatggaggtctccggtgcggctgaacgtattggcataactctgcaacgatgccgttggttatcaccagacgtcactatggttctggtcgggttggtgtgcggtattaccctgtttgttgaagttggggtggtattactgattccgctggcattctctattgccagaaaaaccaatacctcattgtttaaattagctattcctttgtgtacggcattaatggccgttcactgtgtggttccaccacatccagcagctctttatgtgaccaatgcattgggcgcagacgtaggaacggtcattgtttacggattatttgtaggattggtagcttcattaattggtgggccattattcctgaagttcgtgggtaatcggttaccgtttaaacaagtacccgctgagttctctgaatttcaggtacgtagagaagaagatctgccttcgctaagcgccacattatttaccgtattactgcctattattctgatgttgatgaaaactgcggcagaactgaatatggaaaaaggttcttcgttatattcatttttagagtttattggtaacccaataacggcgatgtttattgcagcttttgtggcctactacactctaggtatcagacaaaatatgggtatgactaccctgctgaaaaaaaccgaagacagtttttcatctatcgcgaatattttattaattatcggtgccggtggggcatttaatggaatattaaaagccagtggcttggcggatactctggccgtgatcttatctaatatggatatgcatccaattttactggcctggctggtagcgattatattgcacgcggcggtaggttctgccaccgtggcgatgatgggcgcgacggcgattgtttcgccaatattgccgatgtatcccaatgtcagccctgaaatcattacgttggcgattggttccggagcgataggctgcactatcgtgaccgactcattattctggctggtaaaacaatattgtggtgcaacgttgagtgaaacctttaaatattataccacggcaacgtttatcgcttcgttaattgccttggcggcgacttttttactttcttaccttatttgatcaacaaagagatattccatgaaaaagacagaaattgataaattaattaccgactaccctttagtcaaaaatcttatcaatctggaagaggttacttggtttaatcctttgtccaccacgttggaacagggcttgccctatgtagggttgacgcaagaagatgtggctgaggcggaagcccgtttacagcgctttgcgccttatttttgccaggcgtttcctgaaacgcaaaagactcagggtattattgagtcggagatcgttgcgattccagaaatgcagaaaactctgcaacagcgctataactgtgaaattacgggccgtttattgctaaagaaagatagccatttgcctatttccggttcgattaaggcgcgcggcggtatttatgaagtattaacacatgcggaaaaattagctaaccaggctggtttactatctgaaactgatgattatgccaaactgttttccgagcctttccgcgagttttttggccgctatcggattgcggtcggctcaaccggtaatttgggaatgtctattggcattatgagtgccaagctcggatttagtgtcagtgtgcatatgtccgccgatgctcgggaatggaagaaaaagaaactacgagaacatggtgttaacgtagtggaatatgagcaagactatggcgttgccgtagagcaggggcgtaaacaggcagaatccgatcccgattgtttctttatcgatgatgagaattcgcaaactttattcctcggatattcagtggctggaaatcgtctgaagcagcaatttgccgagcaaaatatcctggttgatgaggatcacccgctgtttgtttacctgccatgcggtgttggcggtggccccggcggcgtagctttcggattgaaattagctttcggcgataatgtacactgtatttttgccgaaccaacgcattctccatgtatgttactgggcgtgtatacccagctacatgacaatatttcagtgcaggatctcggcattgataatataactgctgcagatggtctggccgtgggtcgcgcctcaggtttcgttggaagagcgatggagcatctattagatggcttctataccctgagcgatagcgaaatgtatgacctgctcggattgctagctcttgatgagggaatccagctagagccttctgctctcgcaggtatgccaggagcggctcgggtaacaagttctccagattatcttagcaagcatggttttagcccagagaaaatgaaaaatgcaatccatttggtctgggcgaccggtgggggtatggtgccagcagcggaaatgagtaaatatctcgctaccgcgaaaatttaggttagctgcatttaatctcagttgacgtgaataaatgatattcaagggccaccttattttaggtggcccctgttgttaatggtgttagccaattcatcggcatcttcattgaccgatatattttcacacagagttatcaggcttctggatgtccgtctatagctgcggctaaatctcgatattcttcacattcagtaccgcataggtctttaattgtcgccaattcggctttagccagatcggggcgacctttaatcatataagcctcaccgagatattcgcgaactttaggataatgaggatcaagggcaattgagcgttgataataactaattccttcgtctgtacgacctaattttcgggtggcataaccacgataattccatgcttcacgggtatttggttgttttaacgtatccaatagatccaaagcttcctgatagcggcccgtttttgccaaatgatatgcatactgtgttttatcactgtcgctgaccatgctggttttttccaccacacaactattggttttggtgtcataaacctggccctttgggcaatccggcgttttattcgaatcatctcccattgcatgagttagtgtagggaccagtaataaactggcgagcaaacatatcgacggtaattttttcatagtattagaagccggatggcttttcatcatgatgtcctgttttgaggcaacatcgagtgtcgctgttttcacggagagagtagcaactgatgaccgcagtgaggataaaaactggctcaataactagccatacccgcaggggccactctctaagtaaatactgaatcgcaggataatcaaggtgggtatgtttataagaataggggggatattcgtattcttagggcttagtggttaacgggtgctttaactaactattcaataagattttttggttggttgctatgatattggttctcgatcagattattatcagatacgaatttgatgacgaaaattagcgatgcagtcaactcaaaattggttaggttaataagaagataaatatatctgtaattatagagtacgtagccagatactgccgcgtactccattctggggaaaaaactttgcaatcatctatcataggcatgataggtttttgattagcggtttggcgtaatatccgatgccaaacggtctattagctctacgacttcattacttgccgtctccatatgttcaagagccgacgtcattgcatctatatcgctgtcaaaaaaagcactaagcgctaaacggccagaatgatgaactgccgcatgaggtttttctaacagttgataagcagagtaatgggcaagattacggccatcacctgctgcataccatttgcctaaacggcattccgtgtgcgaattcacctgaacactatcgttattatctagcaatagtttatatatttgtaatttccatatgacatgatcaattttaacaatgttaagaaactgtaggttggtaatgaatgcaataattgattgcatatgagaagaacgggtaataacgatattgattgaatctacgatattagaaatatctttcttaatatgctcaattaatggtttttgttctgatactatgctacaaactttgactgtattatcttcaatagattttgttaactgaaatatatcatcggtactttctttgacttcgccagacaatgattttatttcctttgctatcacgctaaatccgcgacctttgttccctacatgagcagcttcaattgctgagtttattgcgataagattagtctggtttgatagtttgtttatttcggatacgcaacctttaatttggtcgattgattttctaaactcagttaatgaatcggtactatggttagcattcgtctcaatatgaacaataaagttgaccagtttttccagcgcttgctttgcctcgtcgtttctttgattgagttcgtctattgcattttgttcgcgtttgaggtcgttgctggaattgagcagcgagtcacgaaccatctctagagttgaaaccccggttaaaagttgctggcaaataatcctttcgtagggcgtgcgttgagagatactctccgtgttcgactccgttgaatttaagggggtaatatcatgctgtaaatttgacttagtagagaataacatctgatttattttttttagcatagtgaacattcatattgttatattgacggaatattttatactttaggtgttcttaaaatggtgatccaagtcatatcagttaatatttaatttttattataaaaatatgagcgattttataaagaaaatgaaggtttattattgatgttgattctcggatacatatatggagaaaggtagggggctgacggcgattaactgtgttgttgaaaggcttaatgagggtgaccaacaaaagctatttaaatttattattgaagttatctatacggaacgttaattttaaactttacatgtaaaaacgatgttcaccgatttttttatcagtaaaattttccgtttgttacacggaaaagagcaacggtggacatgaatagattattatgagcgctattgatagtagcggattataatttctaagaatacagcagaagttaattcataatatgttcggtatataatcaatttaaactgcggttatactctttttgcctacttctttatacacactttttggaataaacggcagccagtcaggttgggagtcgaagccgccgatcagttgccattgggtgtttacggaagcagagatttcaattaagcgcatgactatatgcttaccgcaacggataaagcagggaactccgccacagctcagggttcagtcacgattgatgcaatcggtccacacttgacgttgcagatttattcgtccaacgacatttttgtaggaaatattatcggtaacgttcggccgactttctctggtcagatggatccgggtattcgtattaccgtttctattgcggggggaacatatgatgtcatagcggatgaaggaggcgactggagccgcacagtacctgtttcgccaaggatgactcttgggattacgagaatatcgccgcggatgttgccggtattacccgtctgaaccgccaatatttagagccgctggaatgaaccaagaggtatggactttgtgcgtcgctaagtttgtagggtttgtcttttgatttagcgcctcggatagccgtattggttaacggcatgagtgttccttacaataaaggggtacattattgttcgaaccgattataccctgtttagtaccccgataacgttaggctgtagcgggtttgaaaggtctgttatgggatgtggttttaatttaacttgttgttttaaattgaataaattttttttgggatgtattgggaaggtgtcgtggtgtccccgactggaatcgaacttttatcttaattacatgtttttaatgcttatttttaattttaagttaattgtttatacatatcgctatacgtttattttcgggcttatagcgatatgactgataatcagttttcacatgactaattctaatcgatagaaacttcacgaatttcttgatttttacttactgtccttccctgtcctttattagtgttcattgcccttcaaaatcagtcccaaaaaatcagtcacacaagataaactcattgcctgctttttatactaaaatcacttgttttattcccgcaaaaaactagtaatctaagggcgtccgatagactcttaagcaaaccaatggagtattcagtaaatagttgttaattttacaaagtgttacatttattttttttcaataaatttcagcttaattaactgaaatttatattaactcatattaactcgatacgaataaatactaactgatactaagtaataccaactcaatgatgaaaaacattggatatttttattaaaaggtaaaaacacaagaaatagttttgttgggagtgccaagtcatgaactttacagaaagcatattgcgtgtaagtctataggcatccgaggggatttagttgtattgctctcagattatagttatttacgtttctttacgaatgaggctgcttatccatatttatctatatttatcaatattcactcttggcagtacaaaaaataactacaaaccagagtgtgatttggcatagttctctaaccctatatttacatcggctaggggaaatgtaagtctaatagtgtcttcacacatttatacaagtctattaaaggataactttatggagcgggattctattgccataaataatatggcaaaaaggttaatacggttacccgatgtgatgtctattaccgggttaaaacgttctactatttatttcaagatgaaagaagggaacttccctaacaatatccctatcggagaacgatccgttgcatgggtagagggggaagtaattaattggattgatggaaatatttcaaagagagaaatgagatgctaaaagaattaccgttaactccgcatgatgccgaaattaatgtgatatcaacgtatcaacctatgttgttcacccctgagcagggggatggtggttatgcgattcgagtaatagaaatctatcggttacataacatgttcccattgttggataaattcgaagaattaacgggatatgccgcacctaggcttgtttgcacgccagatgaaataaatatgttagtcgagcgaggacgtaagattaaccaacaggaagaagttaatgtaagaactattgaaaatgaattaaacctagtcggccgtgagctgggtaatgctcaacgaggaataagtagtttatcaagttacaatggcagtgtccgtagtttagttgcttctgttcaggcaaagtctgaacttacacaacgacgtttagctgatgcccaagataaactagcggctcgtagaggactattagggctgttacgtagtcatgttgaattgatgctgagccatagtgttaaaggattcaaaaataagattatggagttcttaccattagattctttttcatccaatacatacaaagatggttggagtagtactggattaaaatcacatgtatatgcatggaatgagctaaataaattagagttagcactgaaagagatcatatctaggtgcaccgtacctacggataagtatttaattgctcatggcggagttgaattatcaaaattaaagaaaaaatattatcagcctgagtcagagggaatgcgagattttatgtcggctgatgatttttctaagttaatgctgagtaaggaatcatgggctaacaacaaggttaaaattgcaaagcaacatttataataatttattagaactaacccctatattaaataaaggttaaaaataatggtcagagttaatcctcctgctatggcgggacagtttcatgcaaattttgttggtggaataaaatcacgatttgatagtgagaaaagtttttcaatatcggagtcagcggagaatcagttgcgtatatctatgctggaatccggttggatgatgaataatattactttatgggatgtagatgaagaagaaggacaaaatattgaaattggtgaatctgctttacatacaggacgaactattgaaggacgttttagccgaggattaaaaatagagggttctaactattcactcgcagatacggattcttgtgcttcgctttcgtatcaacgaatgagtgccattgctaatgttgggggtattgaacattttacccaaactgtttctgatttcttcggcatggctatttcattggatatgctgagaattggttttaatggtcaacgtatttcttatccgacagatccaattgctaatcctaaaggtgaagatgtcaatataggttggcacgcaatagccaaaggatttaataacggttctcaagttataactgacgccatgacattgggggagggcggggatttcccccatttggatgcgttggctaatcatattattactgaaaagatacccgaaagttttagggaagatccccgtttagtggtgatggtaggtgcagagttagccgcagcggaacggatgcgcttatttaactccgcagatcgtccggctgatattgcagcagcgcagatgttaacgagttcggtggctggtcgttttgcttttgttccgccatttatgccgggtaaacgcttggtggtgaccacattgagtaatctacatatttatacccaaaagatgagtagacgctttagggctgaatttattgatgagcgctgcgtgtatgaacacagttattggcgtaatgaaggctacgcgttaggtaataattctctgtatgcagcagtagatgaaaatgcaattagcttagtgcaaaggtcaggtagctaatgacaaattcacaattaactaccggctggatatgtgtggccacggaaggtgagacaatagacgggcgtcagattgaatcccaatggttggcggatatggccaaaatctacgatgtgcgcacctacacggcgctgatttgggaagagcatttacgtgatagggataatttaggggaagtgctggcgctgcgtagcgacgtacagaacggtattacccatctttatgcccgaatccgccctacggccaagctggtgagtttcaatgagcaggggcaaaagctgttttgctccatcgaagtggaagaagattttcaggacaaaggtcatttttatttaagtggtttggcggttactgatagccctgccagcattggcactgaccggttacgttttagtgctaaccgttcttatttttctaagcgtggtgttaaagcaaaaataagtaagccaagggaatttagtttatcagacgccactattatggctggtaaaggctgggtttccgcaatagcgctgagttaattcttatattacagataagaaatacccggctgctgggccgggtatggttctctactatcggaaaataacaatgataaataattcaattaatgctgatttgactatctcactcaccgttatttccgtcaataaaataggttcggatatatacggttatattactgacaaaagtatttatgctttaggttctatgccacggcgttttaattcctgccgggctagctctttaaaccaattaccaaggcttacgccatctttagccgcttccgcattaagttgttcacgcagttctggcgcgatacgaatttggaatgttggcgatagaccttcacctttcgggcttttatctcgttttatagttgacacgtacgtacataacctcataagctgtctttcgttaggtacgtacgttaacacggcgtaccgacaaaatacagcggcccgtcaaggtgctaccaacaccaagccgggcctgaccatcatgttagaggaactaacgcaatggctacgtcaaagtgtacctacatctttgcggcgatcaaccgcacccaacagaaaattagccctgtcatgctgcatatcaccgcagagaatgagaagacggcccgccgccgttatgccgcagattacatactgctttttgccgggcgtttgcctgtgcaggaggcatagcatgacgactaaatataatttagcgcagggaagtgtagataaagttctacgggccatgctggtttcagaattaatgagagagttattgtactcaaaaaatgaaaccccacagcctcatgttaattcagtcaatatagcggctgtctttgattgtatttatgaagatttagattctgtattggataacgaatttgacaggggaaagaatgaaagccgttaatttattcccgtcactgttatttcttttcatatttacaatggagacgccgcgatgagcagtcaatttgtctctgaaacgctgcaagcggcccgtgggcgttggccgcatattttgccagcgttgggtattaccgtgccggataatggtaaacacggcgcttgcccgaagtgtggcggtagtgatcgtttccgctttgatgatcaagggggccgtggcacatggatttgtagccagtgcagtcatggtgatgggctggatctcattcgtttggtttctggcaacggggcatttcaggcggcaactgaggtggccaaggcgctagccttaccgaatgcaccgcaggaagcgattaagcctgccagaaatgaaatccccgaagagcgaaaaaaggcgatggtggccaaggcttaccacgctttgctagcccattgcagcagcggagaaaacagttatctggctgataaggggctgtctggccatagccaatccattacgcaggatgttcataaaacgggagggatggacttcccggcaggttctttgctgttaccgctaactgatatcgacggcaagttaaccggtggccagcttatcagcccgttaggtgacaagcggttattgcccaataccgtacttaaaggggcgtttattgcggttcacccattagaggcaggggataacccggagctggttgttatcactgagggttatgccacagctttaacgctggatatgttaactgatgggctggttgtggcggcagtcgcggctaacaacctgccgaacgtggcgcaacacctgcgccataaatggcccgatgcgcggttgattatcgccggggataatgattttgatgatggtaaagagaacaccggcaagcagtgggccgagaaagccgctaaagcagtagatggttgggtatcactaccaccaacccgtcataaagcagattgggatgattaccgccgtgataacgggctggaacgggctaaagaagcctttcgggaagaaatgatcctgtttggtaaaggcaaaaccaaactgccgcaggggttccgcttaacgcaggaatatctttggtatgacaagttggtgaataagtctgatggtgataccgaaatccgcaatatcaaactgtgcagcccggtaagagtcacggcgattacctgcgattctgacggcggcaactatggccgcttgctggaatgggaagacaccaacggtatcagccgtaagtgggccatgccgatggagatgctcagtagcagcggggaagagctgcggcgcattctgttgagtaatggcctgtcttatatcagtaccaccgggcaggcgcgggcgcatttgatggaatacctttccctgtgcaagccagagcgcaaggtaacttgtgttaataaaaccggctggcatggttcggtttatgtgctgcaagacgaagtgatcggcgttggggctgagtcggtaatcttacaaaccgccagcgtacaggggcgggatttcaggactgccggaacactggacgaatggcgcgatcaggtttcccgttattgcgtcggtaatggccgggtggcgttttcggtcagtctctcttttgcctcaccactgttaaaattggtcggtgtgggcggcggtggttatcacctgaaaggggaatcaacggacggtaaaaccaccacgatgaaagtggcagcttcagtttgtggtggcactgacttctggcatacgtggcgctccaccggtaacgcgctggagggcaccgccagccgccgcaatgatgccaccctaatgttagacgaaatacgggaagtggatggcagagaggccgggaatatcgcctatatgctggcgaatggccaagggaaagcgcgggcgcgtactgacggcagtttgcgcgaggctaatcgctggtgtctgttgtttctgtctactggtgaattgtcgttagtcgaacatgcggccaacgccggagagcgtacttatgccggggtggaagtacggatggtacagatccccagtgattccggtaagcatggtgtatttgaagagctgcacggttttaccggaggtaaagccctgtcggagcacttggaacaggcggttgcttcctgctatggcgagccgttccgtgcttggttgcggctgttaaccgcagacctgaccggcatgaccagcaaggccaagatactgctaaaagaatacacccggctgcttaccccggagaacgccggtaatcaggtgggccgcgcagttacccgttttgcactggtggcaatggccggagagttagccacacaagtggggatcaccggctggccagagggcgaggcgttccgggcagcacaaacctgccttaatgcgtggatgggggatcgtggccacaccgccaatcaggaagacgccgccgcactggaacaggtgaaagagttcattacccgtaatcagttcagccgctttgctgactggcatgacgagcgcagccgcccggctaacatggtgggcttccggcgagtggataaaggcaataacaaagaagatgcggtgacaactttctttattttggccaccggttggaaagaaatctgcaagggatttgatgccaagaaagtggctcaactctgcgtcaaggccggttatctcgatgtgccagaggatgcccggacacagaaaaacattcgcctgccagaaatggggctgaaacgggtctatcagtttaatagcacggttttaggttaatacacttacgtgagtcttatttagaactggtaacactggtaacagaggtaacaaccataagccgcaaggggtagagctgttaccagtagtagagggctattggtaacactggtaacagaaatcagcctgttaccactggttaccagttgataatgcctagtggtaactaattttatctatataaatcaatggtgttaccagcgttaccactgataccagttacagacgtaagagacaatataaaaacgagtcagttcgaggcttattttctggccggcggttctggctttaaatagaggggccatatcaatatgcgagtttttaaagttatttgtccagattgcggtacacccgctcatattcgtaaaactaaccgcaagcatagccatatagcggatctctattgtgcctgtaccaatgttgaatgtggccatacctttgtgatgaatgcgaccttttcccatacccttagccccagtgcgttaacgcatagccggttaattaaggacttggtagaccatatatcaccgcaggaacggcaagaggctatccggctattgcaagtggcccataaagatgaggaacaacagcaggcaatcagtgacgcaaaaccgcaaattacgcgcagggtgagcaaggattacgtgaccaaccgttagcccggtgttaccactctggcgctcgattttcttcccggccctgtactgtgtttttcagttagcccaaaatgaccttgccccgcgaagccacgcccggcaagggtttcaacatttcccccacgctattatctcacccaacttttcccatcctcgccacgtaaaataaaatacttgttttaaatcatatgattaaaactttaagcggtaaggttagaaaaagcgaaactgaaatttagtgaaattcttttcaatcttttcagttgggattatcagccagagccccagccacggcgcgggctggcgctagggtttgtaggaatataaaactgaaataagtttataaagcaaagtgtgcaggcgggtgcggtgtagtgccatttccgtcatatttatatttttccatgaaacgatagagaaattcagtcaattagttttatcaacttgaattgattatttgatccgtgtcacagcagaaaatttacttgcaatgtgcatgatttttatacttgaaattgctttcaataagaattcttaatgagtaatgtaacttactattactgaaaataaatcgaggtgattatgtcgttacagctcttaagacaagccattcaggctcgtaaaccaatttcatttgaatataataagcctggaaagattccgggtgaacgaattggtaatcctcatgctatttttattatgagaaaaaaagaccaatctgagtctacaaaagtacatatagttcaagtgggcggtgtcacagatagcgcacctaatttcccagagtttagactgtttgatattgctgaaatttcaaacattaaaattattgatgcaggtgctccatttgcaattgatggtggctataatcctcattgggatggatataagaatgtgattgcgaaggtataatatgagcattgaccattcatatttgattggaagagatgatgttaatgatttggtattaaatatatcaggtcttgatgcagactctagggatgtatctacgttaagtgcaaatatttttgctcattgcactagcactggatctccaaaatttacttgccaattaaatattggtcatttgcaaagtctttatcaacacctttcacaatatagtgttattcgtgatactgagtctgtaagtactggtcgttttatagagatccaaagcaatcatgaggaaataatgagagttttggagcattcggataacacttctttagtattagcattacagcacatcgtaagtaatagacttacaaatactgatattaatacgattttagggcgaaaagatgctcttgatgagtatgagcgaatgtatgaaaatgctaattattataatgaaatagaatggcagcgtttttttgaaaggaatgagtggatatttgggtatggtttaaattataaatatttaaaaatcctacagagagaagcacacatctctcatacagatctcaatgggtctaatgatgttataacggattttttattatcagactctagatttactaaaattgttgaactgaaaacacctacaacaaacttatttgtcaatcgccagaatagagctgattcttggcgcttatcaagtgagcttactgatgctgttagtcaaatattggcacaaaaggcaaattgggaaatagaaagccaaagaagtaactacacctctgatggggatttgataagagaagaaacacatgatgccgaatgtatattagtaatcggatctatatcttctattagtgggggtgaccgcgaaaagttaataaaaagaaaaacactagagctttatcggcgtaatttaaaaagtattaacattctgttttatgatgaactattagaacgcgctcgatttattgtaagaagcgccgaaattattgaaaatgccattggtgaaattttagaataaacatcaggcggcattcttatttctgtaccatcaatatacaaatatggtgctagtataaattatcactataccactgcaacatatccctacgtccttcaagatattgtgcatggttataagttccacggatggaatttttatcaacatgggcaagctgggtttcaatccatgcactgttatagcctttctcatgcaagatagtgctcatggtgtgccggaaaccgtgaccggtggccctgccgtgataacccagcatcttgatcaccttattgatactcgcctcactcatcggcttaccggcatcattgcggccggggaacactaacttataattccctgtcagcatctttagcttttcaaggatcgccaaggcttgtgcagaaagtggcacaaggtgagggcggcgcttcttcatccgttctttaggaacctcccacaaggcattatccagatcaaattcagaccattcagcggcccgcagttctatagttcttacgcccgtgagcattaacaactgggtggcgtatttggtcagtttgctgcctttatagttatccaatgcctgaataaattcgggtaactcactttcagtcaggaaagggtaatggccattcttggggcggtttagtgcgctggccagatccggggctgggttataagtggcccgcccggtcactacggcatagcggaagacttcaccacagcgccgcctgattttcccggtgagttccagtgcgccacgtttttcgatacgttgcagaacggccagcagttccaacggcgcgatctggtcaattgggcgcttgccgatataaggaaatacgttgttatcgaagccacgcataaccgtatccgcatattctggtgtccaagtgggtaatttggaggtgtgccattctttggcgatagcctcgaacgtgttggcgtgggaatgctgtagggctatcttttcagctttgcgggcatcactggggttaatgctgttggccacttgtgctctggcctcatcgcgtttcttacgagcatcggctaatgaaatatcaccatacaggccaaaagatatcattttaggcttcccggcaaagcggtaacggaagcgccaacccttggagccattgggttcaatcaatagggataggccattgccatcattcaaggtataggctttatctttggctttagcccggcgaatttgaatatctgtgagtagcatgtgtatagccctaaagatcgaacctagtgttatacgcaatcctatacacatatgtgtttagattccactaaacattatggggtctctttagacgccaaatgtctatttatcgttgttttaacaggattttatggacttagtgggatgtgctgagaagtgctaatggtgtccccgactggaatcgaaccagtaactagcccttaggaggggcttgttatatccgtttaactacggggacatgccatgatttttgctgttgataaaagcagctgggcgtcattatacctattttcactctgaaaataagcagttagcggtttgtttgtttaaattgtcgccagttatcgcttaaaaatgcttatctcccaatgcgccagagaatgctggctccgatcggcggttagatttactttttgtacaaatccgtttttttctgggtatttcctttagattttttgggttttctcgtcatatcgctgcgtatttgggcatggcttatcagagcaaatataaaggaaccaccgatgatattgccggcaagcgtcgggatagcgaaggggtaaataaattcctgccatgaaagattgccgctaaataccagatagaagatctctgctgagccgacgacgatatgagtgagatcgcataaagccaccagataggtcattaagaaaatcacccagattttagccgcgccagcagagggtagcatccacaccatggtggcgataatccaaccggagagaatgcctttagtcaacatttctgctggcgtattttccataatatcctgagcaatgctgataaaagcggcgtgcgtcgcgtcatcaaacaagggaatatggataaatgatcccgcggccaaggcggttccaattaagtttcccagcaacactaatccccaaaggcgaaataaaatactgaaattcttaatgctgggtttttgcataattggcagtaccgcagtgacggtgttttcagtaaacaactgctggcgagccataatgacaataataaagccgaaggtataaccgatattctcgataaaaaagctagcgggcgcatcggataatctggcgtgaaaaatgcctttcgccattaaagatgctcccatagataagcccgcagcaatggccgatagcaatagagccaagccgtcgcgctccagttctttttcgccttcgacgcgaatttgctcgtgtattgcggccgcgcgtgaagggagatttttctcattaacatcaatctcttttccctgctttttctcattgctttctacctgaatatcgccatcgttgtttttatggtcattcatgtttttctcctgaggaaaccggattaaattttcaaagttgatagacgggaggtcctcgattccattattaaggatagtggcttttttacggcgaatattgagatgggaaagaagcgattattgagaaaggaaccgaaacagtcagcaaaagtcagctttggctgttttttctacagaatattgatcttatgccgaatattaactctataaggttaggtttcgggataggcccatgctacgtaagggttaggccttatgctattattccggttcccggttgttgaaaatcttgcggttaaaagacgaatcccatgttggaagcgaaaaatctgagttgcatacgcgacgaacgaaccttatttaagggactgagtttctgtatcaaagcgggggatatcgtgcaggtggaaggccccaacggagcaggaaaaaccagtctgctgcggattttggccggtctggcgcaggccgatgctggtgaagttcactggcagggagcgaatatcctgcgggatcgcgcgggttatcatcaggatttattatttctgggccatcagcccggaataaaatcggtgctcacgcctttcgaaaacctggctttttatcaatcggctcagggtgattttgacgaaaatgccatctggcaggcgttagaaaatgtggggttggtcggctatgaagatttgccggttgcccagctttctgccggtcagcagcgccgcgtagcgctggctcgcttatggttgagtcaagccccgctctggattttggacgagccgctgacggcgattgataaacagggcgtaagtgagttgatcgctttatttgagcaacaggctgcggcagggggaatggtgttgttgacaacccatcaggagcttggcggcgtgcgtcagggggtaagaaaaatcagcctgattgactcggggaaaaactgatgtttgtcagcgtattacgtcgagaattaaagattgcgttcagaaaaggtgcggagattgttaacccactgtggttttttcttatcgtcattaccctgtttccattgggcgttggtccagagccgcagttgctggcgcgtattgcgccaggcatagtctgggtcgctgctttgttggcttcattattatcgctggaacggctgtttcgggatgattttctcgatgggtcgttggagcaactgcttttattaccttcgccgctgccgctcacgatgttaggcaaagtgtgtgctcactgggtcgtgaccggattgccgttgctaattctctcgccgctggtgggcatgctgctttcgctggatgtgaataccggcatcgccgtagcgctgactttgctgctggggacgccgacgctgagttttatcggggctatcggcgtcgcgcttacggtgggattgcgcagaggcggagtattattaagtttgctggttttacctttatatataccggttcttatcttcgccaccgcagctattgatgccgcctcaatggggatggcgattgatggatatctggcgattcttggcgcgatgctggccggtagcgctacgctggctccttttgccacggcggctgcgttgagagtaagcattcattaatcctatttaaatttacagattttgtctgatgaattggggcgatatctggcgaccatgcagtgacgcatcagcttgaaataacatattttttattgaatgtggtagccaacgccatttagagcagattgcgcaccgcaacccgtatcggcttagttagcaggataattaccaagacgattactgtcatttttatagtgagcaatgaccaacatgtggaaatggtttcatcaatttgcccagcctgaaaggctgtacagagtctgcggtcgctttattccgtggttcggcgcagcggccatcatttgtctggctatcggttgggggggaggctttggcttcgcaccggctgattatcagcaaggtaacagttttaggataatgtacctgcatgtgcccgcggcgatttggtcgatgggcatttatatgtctatggcgatagccgcctttatcgggctggtctggcagatgaaaatggcggatttggccgtggcggcgatggctcctgtgggggcggtatttacctttattgcgctggctaccggttctgcctggggaaaacctatgtggggaacctggtggttgtgggacgcgcgcctgacatccgagttggtactgctgtttctgtatatcggcgtgattgcgctgtatcacgcatttgacgatcgaaaactggccggtcgagccgccggtattttagtattggttggcgtggtgaatatacctatcatccatttttccgtggtgtggtggaataccttgcatcaaggctctaccgatatgcagcaaaccatttatccgaccatgcgtactccgctgcgttgggcaatcttcggctatctcttcttttttgccactcttacgttaatgcgtttacgtaatcttattttacatcaggagcgtcatcgcccttgggtggcggaattgttaggtaaggagcgctcgctatgacaccggcattcaactcttgggcggattttttcgcgatgggtggttacgccttttatgtctggctggcggtggccgtgaccttgctgtcgttgcttggtttatgggcgcataccctgtggatgaaacaagggttattgaagagtattcgccgccaacgtagacgcgatcagcgaattcgtcaggcgcagcagcgggagagaaaataatgaacccacgtcgaaaaagccgtctgtatctggccttagtggtattaatcggcataggtttgaccaccacgctggtgctttatgccttgcgagccaatattgacttgttttataccccaggcgagattttacaggggaaggggcctaagcacgaaaaacctgaggttgggcagcgtctgcgtattggtggaatggtgatgcccggttcagtaaaacgcgacccgcagagcctacaggttacttttaaggtgtatgacgcgcgcggtgcgatcgacgtgacttacaccggtattttgccggatctgttccgcgaggggcagggtgtggtagctcagggcgtttttgctgaagggaatcgggtggatgctaaagaagtgctggctaagcatgatgaaaaatatacgccaccggaagttgctgaagcgatgaaagaaaatcacgttcgtccggcggcggcttataccaacggtcagaacgaggggaacgcttcatgatgcctgaaatcggcaatttcctgttatgtctggcgctggcgatatcgctgctgctgagcatttacccccagtggggagcggcgcggcaggacgcgcgaatgatggctgtagcacgaccattgacctacggcatgtttgtgaccgtcgcgctatcgtttatgtgtctggtctatgcctttgtagtgaatgattttaccgtttcctatgttgcggctaactccaatagccagttgccggtgtattaccgaatcgctgctacctggggggcgcatgaaggctcgctattactttgggtgttgttgttaagttgttggtcgctggcggtggcattattcagccgtcaaatgccgcaggacgccgtggcgcgagttttatccgtattaggcatgattaccggcggtttcctgctgtttatcatcatgacttctaaccctttcacccgaactttgcctaatttcccgatagatggccaggatttgaatccgttgctacaggatgtcgggctgattttccatccgccgttgttatatatgggatacgtcggattttccgtggcgttcgcttttgccatcgcatcgttgatggcggggcgtttggataccgcatgggcgcgatggtcacggccctggacccaggcggcctgggtattcctcactctggggatcgtgctgggttctgcgtgggcttattacgaattgggctggggcggttggtggttctgggatccggtagaaaatgcgtcatttatgccgtggctggccggaaccgcgctgattcactctctggcggtgacggaaaaacgcggtactttcaaagcgtggacggtgctgctggcgatcacggctttctccctgtgcttaatgggaaccttcttggtgcgttccggcgtattggtttcggtgcattcttttgcctccgatccggcgcgaggtatgtttattctggcctatctggtgattgtgatcggcggttccttactgttgtacgcggtgaaaggggcgcaggtacgcagccgtactcagcatgaagtgttctctagagagacatttttgttaggaaacaacgtattgctgatcgcagccatgctagttgtactactggggactttgctgccgctggtacataaacaactggggttggggagtatttccatcggcgaacccttctttaataccatgtttacttggctgatggcaccgttggcactgttgctggggatagggccgttggtacgctggcgtcgggatgaaccgagcaaattgtggcgtcgtttgggcgttgccttggtggcaaccacgttactgtcaattttagtgccttggttaatgcaggacagtatcgccggaatgacggtagtgggtttgatgatggctttctgggtcattattctgacgctaatggaattgcatgagcgagcaacccatcgccacggtttctggcgcggcctgactcacctttcccgcagtcattggggcatggtattagggcatctgggcgtggcggttacggtaattggcattgcctttagtcagaattatagtgttgagcgcgatgtccgaatgaaatcgggagatggtattgatatccacgattatcactttgttttccgcgatgttcacgacattaaaggaccaaactacaccggcggcgtaggtatcatcgacgtcacccgcaacggcaaacccgaagcgacgctgcacgcagagaaacgttattacagcacagctcgctccatgatgaccgaagcggctatcgacggtggcctgactcgtgatttgtatgcggcgttgggggaagagctagaggatggttcctgggcggtgaggttatattacaagcctttcgtccgctggatttggtacggcggagtatttatggcggtgggcggtattttgtgtatgttggacccgcgctatcggatgagtaagaaattaacgcgcggtatcgcaccggaggtacagtaatgaagtctaagttattgtttattccgctggtgttgttcctgctgctggtggtggcatttttagtgcaactgagccgcaatgccggaggggaagatcctacgatgctagaatcggcgctgattggtaaacccgttccgacctttaagctggaatctctgggtcaggcaggaaaaacctacgatcaggcggtactgcacgatggtaaacctatgttacttaacgtgtgggctacctggtgcccgacctgccgcgccgagcatgaatatctgaataaactggcggcgcagggaattcgcgtggtcgggctgaattataaggatgaccgtgccaaagcggtgaactggttgaatacactagggaatccttacgcgctgagcttatatgacggtgatggaatgctgggattggatttaggcgtttacggcgctccggaaacctttctgatcgacggacaaggtatcattcgttaccgccatgcgggggatcttaacgatcgcgtctggcagcaggaaattctaccgttatataaaaagtatcaggagggcgcatgaggctaatcagtctggccctcggtatgttactgagctggggcgcgttcgcagccattgatacttatcagttcagttcggttcaacaggagcagcagtatcgggaattaaccgagcagctgcgttgccccaaatgccagaacaacagtattgcggattctaatgccattattgccgcagatatgcgcaataaagtgtatgaactgatgcaacagggtaaaaccaaacctgaaattatcgattatatggtggcgcgttacggcaattttgtcacttatgaaccaccggtgactgccgctacgctcattttgtgggtggggccagcgctgtttgtgctgatcggcggggcggtcgtcattttacgcgggcgtcgccgtaaccagatgcttgctgaagacgagttaccggagcaggaacggcagcgtctggctgccatactggcgcagaatgaagcggaaaaccggaatgtggcaaatactgacgggaaacaaccataatggctttttggctaatagtaatcattgcgctggccggagcgggtgccctgttagtggttcctgcaatgaaacaaagcaataataaccgcaaaactacgcgggatgatctgaataaagctttttatcaggatagattaaacgaactggcagaagacgaagcgcagggcgtggtcaccgagcgaccggaactgatcaaagagctacagcagaatctactgacagatattcccgagcaaccggcggaacaatccagcccgatcagtcgttgggctttgttgcccggcgtggtgattttggtattggttgccataggattttatgtcaaaaccggtggtttaacccagttgcacgcgtggcgggaagtacaggcgcaaatgccggagttacgtgccagagttgccaatgaacgagcagagccgctgacgatggaagaagtggcgcgcttgggtttagggctgcgcaccgctttgcagcaagacgataacaatgttaacgactggatgatgctgggccgagtgggtatggcgctgaataatgcgactaccgcgacgcaggcgtttgaaaaagcctatcagctcgcgccggataatatggacgtgaaactaggctatgccgaggtgttaacccgttctaacgatccccaagataaccagaaagccacgcaaatgctgcgtagcatgttggcgcaggatcacggtaacccgcgagtgttgagtctattagcatttaatgcctttgagcagggagatttcaaacaagccattggcgcgtgggaagttatgctaaaattgctgcctgccggcgattcccgtgctgaagtaataaaacgcagtattcagcaggcaaaagcacagtccggtcaggaaacagctaaactggaagtgacggtttctttgtctcccgatgcggctaaaaaattaccgcagcaagggactctgattatttcggtcactgacggagtgagtccggtgcctgtggccgttaaacagctgccgctgagccgattcccactgacgttatcgctggatgacagtaatgcgatgatgccggaatcgttgctttctgctttgcatcaggtaaaagttcgggtgcgtttatcgctggacggtacggcaaatcctcagcgcggtgactggtttggtgaaagcgtggtacaggaattcagcggtaacgggcagattagcgtccagataaatagacagatcccctaagcgcaggggctgaacgtaatttcatggagaaacatatgaattttcgcctgacagggctggctttcgcgagcgtattattggtgggttgcgccagttcttcaccggatcagatggaacaaggccgctccgatccgttggaaggttttaaccgggcgatgttcaactttaactatgaggttcttgacccttatgtagttcgccccgttgccgtagcctggcgtgattatgtgccgcagcctgcgcgtaacggcgtgagtaactttatgggtaacctggaagaaccggcgagcatggtgaacagcttcctggtcggtgacccgtacaaagcgatgaagcactttaaccgtttcttcctcaacactttattgggtatgggcggtctgattgacgtcgcgggtatggctaaccctaaactggcaaaagaagtaccgcatcgtttcggtagcaccttaggctactacgatgtgccttacgggccttatgtggtgttgccgggttatggcagctttaccgtgcgtcaggaaggcggcgactgggctgataacgtctatccggtgctgagctatctgacattctggatgtctgcgggcaaatggatgattgaagggattgaaactcgtgcgcaattgttggattccgatggtctgttgcgtaattcctccgatccgtacctgatggtgcgtgaagcttacttccagcgtaacgatttcctcgccagcggcggtgtgttgaaaccggaagcaaatccaaatgctcaggcaattcagggcgatctggaaagcatcgactcagccaactaatcagtttgatatatcaaaacgggttgatatataaaagcggattgatatgtgacagataaaaaaagcgccttcaggcgcttttttgttgccgcgaattcgtcaacttcccgattcagggcgcacagtcggataatccaccctacggcgcattatccggctgatttggggttagaacgcgtagttaaagttcacgccgtacagcattgccgtacctttggagttgaactcgtagttcgtgccgcccaatgctggtggcgttttctcgttgatggtcacgttctggccgtgcatgtaggagatacccacgtcaacagatgcgtctttgttgaacgcataggtagtaccggcactgatccagaaacggtcctgatcggggatcgaaatggagcggttttgagctggaaccgggctatcatcgaacgcgataccggtacggaaggtccagttatcgtcgtagtaataggttgtacccagcgcgatacggtatgcgtctctaaagccttcgtgcttctcgaacagtaccttaccgttgttacctgtggctttcagctcctggaattggctccagctggtgtaggccaggctatagtgaatcgcccactgcggtgccactttgttataaccggacacttcccagacttctggcaggttcagtgtcagagcaccaggaacgattgcaccgccagttccgccaaaggctactggtagctggttgctgtaatcgccatcaaagtcgattttcactttagaacgataagtgaagctgtagcgattttctttatcgatttcataaagcacgccggcgttccagccgtagccccactctttaccttccatattggcaacttcggtacgcgctggcagacctaaacggccacccgcttcaccaatgtgacgcacaattttcgcatcggcataaacggcgttgaagcccagaccgaagctgaagttttggttcagacgatacgcagccgccaggttcaggttagcggttttcagatcggttttaccgcctagtgagccggcgatatagtcttcattaaattcggtggctaaaccgtagttggaagtaccggatgcgccgatagcccattgttcattcagcggcataatgaagtggatgttaggaatccactcagatggcgcgatatttttagcgtcggtgctgcggcctgtcagcggagattgaccgctgatatctacgttagggtcaacgtagacaaaaccgccggagaatgaaggacggtcaaacatcgtcatagctgctgggttgcggctacctacggatgcgttgtcggcgacggcgccttcaccagagaaagaacggcccaatgcagccgctgaatattcattcagctgaaaaccggccgcagaaacgttcgaagaaataattgccactgcagctgccagagctgatcgggtaaacaggtttttctggttcatgaccaaaacctcattttaatgtgtttattatttaaactatgttacatagcgtaacaagagagcgcgggattgtagggtccgttaccaatctgacaaatcagaccagtggctgaagtataggtctgacctgtaggaatgttgcaagaatgtttttgaaattgattgaaattgattgcaaaaaatagatccacttaacaaaaaacttacatgcccatatcaataaatctatgacttattatttttgcgatgctttaactgagattttcgtcactaaataggcacataaacagtaagttctagtgatgcggggtttgcaggagtaaaatagcggcagatatcgatttttgagccagatcacaaatggcaatttgcacctatttgaaatgtcccttgaggagaattgaagatgtcagatgcaattaaacgctgtaatgcagaagaaaccgcagcctgctgctgcgtagatgtcggtactgtgatggataacaccgattgtaccgcgtcctacagcaaggtattcgccagccagagcgaagccgaagcaatgctaaacaccttgatcgaaaaagcgcgttccgtcgaatccgacccttgcctgattgagccaagaatcgagacggtagcagaaggtgttcaactcagcgttgattttacctttgcctgtgaagcagaaatgctgattttccagctgggtctgcgttaatctggccgtatttagcgcggagctttcgctccgcgctatttaatcactgaatctatttccttattattctttctcccgtctattcgttttcctctttccctatctctcttttttattctgaaagttgctcctgctcgcatttttggcctcaataggtttgccaaatgtaaacgtttggttaacaataatcggatcaggtcagacctgttaacctagcatcctaataaatgccaatttatctctcaggagcctttatgagtaagccacttccgttagtgacgcgtcagggcgaccgcattgcgattgttaacggcctgcgcaccccgtttgctaaacaagctaccgcctatcatggggttcccgctgttgatttgggtaagattgttgtcagcgagctgttggcaaaaagtggaattgcacctgagttgatcgatcaactggtatttgggcaggtggttcagatgccggaagcgccgaatattgctcgtgaaatcgtattgggcaccggcatgagcgtacacactgacgcctatagcgtctcccgagcctgtgccaccagttttcaggcggtggcgaacgtggccgaaagtcttattgcggggtcggtggggatagccatcgccggcggcgcagattcttcctccgttttacctattggcgtcagcaaagcgctggcgcgtacgctggttgacgtcaataaagcccgaactttgtcacagcgtctaaaactattcagtcgtttgaaattccgtgatttattgccggttgcacctgcagtggcggagtattccaccggtttgcgtatgggagataccgccgagcaaatggctaaaacctacggtatcagccgggaagatcaggatgcgttggcgctgcgttctcaccagctggcggcggaagcctggcaaaaaggctatttacaggatgaggtgatgaccgcttatatcccaccataccgtgcggctatcagtgaagataataatgtgcgcaaagattccaccatggcgcaatacgctaagctgcgcccggcattcgatcgcaagcacggcagcgtaacggcggcaaacagcacgccgctgactgatggtgccgcagcagttattatgatgagcgaagggcgagccaaagaattggggctgcaacctctgggctatttacgcagttttgctttttccgctatcgacgtctggcaggacatgttgttagggccgtcttatgccacgccgttggcattagatcgcgctggtatcacgctggcggatctgacgttaatcgatatgcacgaagcctttgccgcgcaaacgctcgctaacctgaaaatgtttgccagcgatagttttgctcaacaatatctggggagaagtcaggcgataggcgaggttgatatggataaattcaacgtcttgggcggttctatcgcctatggtcatccttttgcggcaaccggagcgcggatgatcacgcaaacgttgaatgagctgcgtcgtcgcggtggtggattgggcttaacgaccgcctgtgccgccggtggtctgggtgcagccatgattgtagaggtggaataatggaaaatcgcgtagaacagggcaggggagacgccacaatgccttcgaccgagtcggtgtttcagctcagtattcggccggataacatcggagtcatcaccatcaatgtccccaatgaaaaggtcaacaccttaaaggctgaatttgcagagcaaattgcccaagtgctgcaacaagcgcagtcttcgccgcaattacaggggctggtgattgtttcgggcaaaccggattcatttattgccggagccgatatcaccatgatcgccgcctgtcgcaccgcgcaggatgccagggttctggcgcaaaaaggccaggcaacgttagcgcaaattgccgcgttcccgatccccgttgtggcggctatccacggagcctgcttgggcggcggtctggagctggctctggcttgtcatggccgcgtgtgctcattggatgataaaaccgttttggggctgcctgaggtccaattagggctattgccgggttccggtggcacgcaacgattacctcgattgatcggcgcgagcaaagcgctggatatgatgctgactggccgccagattcgcgctaggcaggcgctgaaaatggggctggtggacgatgccgttccgcaggatatcttgctggaagtggccgttagccgtgccaaagctggttgggtggataagccaagtctgccgtggcaggaacgtttgctgaatgggccgctaggaaaatctatattattcaatatcgtgcggaagaaaacgttggcgaaaacccaaggccattatccggcggcagaacacattattcatgtcgttcgccaggggctggataacggcggcccgagcggctacgaagcggaagctcgggcatttggcgagctggctatgtctgcggaatcagcggcgttacgcagcttatttttcgcgacaacgtcattgaaaaaagaaagtggctcaacggcacaaccgcgcaaaattagtcgggttggcgtgttgggcggaggtttaatgggcggcggtatcgccaatgtcactgcgacccgagccggtttaccggtgcgaattaaagatattaatccgcaaggtattaatcaggcgctgaaatatacctgggacgcattgggcaaacgggtacgcagtaaacggctgcgaccaacggaacggcagcgccaaatgatgctgatttccggcactaccgattacagcggcttcgacaatgtggatatcgttgttgaagcggtgtttgaggatctggcgctgaagcagcagatggtggccgacattgaggcgcacggagcgcctcatactatttttgcctccaatacttcatctttgcctatcagccagatagccgccgaggctaaacgtccagaacaggttatcggtttgcattactttagcccggtggacaaaatgccgctggtggaagtgattcctcacgctggaaccagcgaagaaactattgcaaccacggtggccttcgcccgcaaacaggggaaaacggcaattgtggtcggcgatcgcgccggattctatgtaaaccgcattcttgctccctacattaacgaaggggcgcgctgcttgctggacggcgagccgattgagtcaatcgataaggctttggttgattttggcttcccggttgggccgctgaatttactggatgaagtcgggatcgatgtgggcaccaaaatcatgccgattctagtggaacagctcggctcgcgctttgccgctccggcttctctggacgcaattttaaaagatggccgtaaagggcgtaaaaatggccgtggtttctatctctatccggccaaaacttcgggctttaagctgaggaaaagccccgctaaacaggccgatccgaacgtttatgggctattaggcgtcacgccgaaagcgcatatacagcgcgaagttattgcccagcgctgcgtgatgatgatgctgaacgaagcggtacgctgcctggatgaaggcatcattcgtaatccgcgtgatggcgatattggcgctgttttcggcatcggttttcctcctttcttaggtgggccgttccgttatctggatcgtctgggtctggatactgcagccagaaccatgaagctactggaacagcaatacggcgagcgttttgccccctgtgagcgtctggtggcgatggcagagcagaaggcggtgttctacccggaaactgaggtgccagcggaagagtctactgcagcagaatgagtgtaaatccgaaggcattctgcgttcagaatgccttttggttagaatgtgagcgggatcaccgcctgtaactctgctgtttttacctgctgtacaggtgccagtgctcgcgttaccttagccttaatttactggctaagatttaataagcttttaagttagtagctctacattgtgtagagaataaataatggattaaactgttgagtaggctatttattaaacagtaatggttggcggtgcgttttgttggtgtaaaaacagccgttttatttacgtggagtttcaggcaaaatgcccggccgccatagagagacggcgcgttatcgtgatgaagttgctttgtcttagggcaaagttctcggcggtacagcacgcgttgcgtttctgtatagcgttattttgttaacaaaagcggtgcaatatgcaagttctaatcatgcgtcatggcgacgcggctcttgacgcagccagtgatgcacagaggcctctgacccaatgtggcagtgaagaatcacggcagatagccgcctggttaaatagccaatcggtggatattgagcagatactggtcagcccttatctgcgtgcggaacaaacccttggcgtggtaagagaagcgctgactctgcctgacgggcaggaagtgatgccggaactgacgccgggtggggatcctgcgatggtggcctgctatttgcaggctctggccaaagaaggttgcgcttcagtgctgctgatttcgcatcttccgctggtgggctatttggttgccgagctgtgtccgggtcaatgtgcgccgatgtttgcgacttccgcgatggcctgtgtcgatttagacatgaacagcggaatgggcaagttggattggcaagtgagtccctctcagctgatggccaaagtctgacggcttgtgaggatgacctgaaaacaggttagcggctgcggtgtgatacaaacttctgccttctgccttctgccttctgccttctgccttctgacccaaaaggccaaaagcacgattaaccggcatcattaataaaggcgtgaacagttttgctgtcgcgcctttatttttttggctaattcactattgggttaacttattcggctaattcgatcaaaaccagcaaggcggcggtgccaccccattctttcggagcctgatgaaacgccaatacgtccggatgctgcgctaaccacagcggtgtctgttgtttcagaacgtgcttaccgtgtccgtgcataacgcaggcgcagtgtacgtgttcgcgtttacaggctgccagcaaggcacccagctcttgtttggcctgcttttgcgtgagcccatgcagatcgagaaacatttccggtgagtaatcgccgcgtcgcagcttttttacttcaaaatgatcgactccggggcgcacatagcgtgtggggccttcgttatcgatatgcggttggaattcatcagagaagtaatagctggcatcgacctgctcttgtagcaggcgtaccggcgtaattttatgcgctttctgtggtgcctgacgatgcaggatggtgtcctgtttgagttttttggctcccgcgatcgattccctgaaaagttgcagctcctcattgctcaagtgaaatttatttttcattatttattcttagtacctaatcaattttctcagtttacctgctggatgttatctgtctaaataaatgtcgacaaagttttgcacccttttggcatattttcatcgcttgcgtatcattcacatgtgtatagctgctgatttgtcgcgggcttcatggcaaactaggcgcataaaccttgattttacgcatacctgttggagaataaattggacaaaattttcgtcgatgaagcagtgaaagaactgcacaccattcaggatatgttgcgctgggctgtcagccgttttaacgcggctaatattttttacggccacggcacggataatccgtgggacgaagccgttcaactggtctttccaactatctatcttcctattgatattcctgaagatatgcgcaacgcccgtctgacatacagcgagcgccatcgtattgttgagcgggttatccgccgggttaacgagcgcattccggtcgcttatctgaccaataaagcctggttctgcgggcaggaatattacgtagacgagcgcgttctggtgcctcgttcaccgattggtgaactgattgaaaaccgttttgaagcgctgatttcacatcagccaaaccatattctggatatgtgcaccggtagcggctgtatcgctatcgcctgcgcctacgctttcccggaagcggaagtggatgccgttgatatttcagcggatgtactggcggtgactgagcacaatattcagcagcacggcgttgaacatcaggttacgccgatccgttccgatcttttccgcgatttaccaccgattaaatacgatttgattgtgacaaatccgccgtatgtagatgaagaagatatgtccgatttgccgcaggaattccgttttgaaccggaattgggcctggcggcaggctttgacggattgacgctggcgcgccggattctggcctgcgcccctgattttcttcaggatgatggcgttctgatttgcgaagtgggtaacagcatggtgcacttgatggatcagtatcctgacgtgccctttacctggctggagttccacaacggcggtgacggtgtgtttatgctgacaaaacagcagctcattgattgtcatcaccatttcagcatgtatcgtgactaagcagtagacacgtttgtgcctgctgtaatacttgccggcgagatcgctctctgaccggcagacggattttgactcatgggtaaggagccgtgatggctgggaatagtattgggcagtttttccgcgtcaccacttttggtgaatctcacggcatcgcgttgggatgcataatcgacggtgttccgccgggtattccaatcaccgaggcggatattcagctggatctcgaccggcgtcgtccggggacttctcgttacactactcagcgccgggagccggatcaggttcgtattctgtccggggtgtttgaaggggtaactacagggaccagtattggcctgatgatcgaaaataccgatcaacgctcgcaggattacagtgcgatcaaagacgtgttccgccctggccacgccgactatacctatgagcaaaaatacggcgtgcgtgattatcgtggcggcggtcgttcatcggcgcgggaaaccgcaatgcgcgtcgccgcaggtgccatagcgaagaaatatctgcatcagaaattcggcgtgacggtgcgcggttatcttgcacaaattggtgatatcagctgcgatctgctggattgggatttggttgaacaaaacccgttcttctgtccggatgccagcaagctggagcctttggatgcgctaatgcgcgaattgaaaaaggccggtgattctatcggcgcgaaagtgacggtcgtggcggaacatgtgccggttggtttaggcgagccggtatttgatcgtctggatgccgatctggctcacgcgctgatgagcatcaacgcggtgaaaggcgtggaaataggcgacggttttgccgtagtcactaagcgtggcagcgaaaaccgcgacgaaatcactccggaaggttttcagagcaaccacgcaggcgggattctcggcggtatcagcagtggtcagccggtggttgcccacctggcgctgaaaccgacttccagcattatggtgccggggcagactatcaaccgtcagggagaagccgtggaaatggtgactcgcggtcgtcacgatccgtgcgtcggtatccgtgcggttcctattgccgaagccatgatggcgattgttttaatggaccacctgctgcgtcaacgcgcgcagtgtggcgatgttaactctgacgttccgcgctggtaactcaatgaagaaaatagggatgttgggggctgcggcctggttcgcgtcctcttcagtcatggctttgacgccgtggcaacaaatcgatcatccggttagcggtacctcgcaggccattggcggtttcgctaatggttgcgtcataggcgcgcagcctttgccgctggaatcggcaaattatcaggtaatgcgtcccgatcaacgccgttattttggtcatccggatttgctgaattttatccagcgattcagcgagcaggccaaacggcaacagttgggtttggtgttgatcggcgatatggctatgcctgccggtggacgctttagcagtggccatgccagccaccagtctggtctggatgtggatatctggctacagttgccaacccagcgctggacttcgcagcagttgctgaaacctcagccgatcgatttggtgtcctcggatggcaaacaggtagtaccgcgtttatggcagccacaggttgccagcatgataaaactggcagcgaaagacagcgaagtcacgcggattttcgtcaatccggcgattaagcagcagttatgtatcagtgccggaagtgatcgtgattggttgcataaagtccggccttggttcggccatcgggcgcatatgcacgtgcgtttgcgttgcccggcggacagtttggaatgcgaagatcaggattcaccgccagcgggtgatggctgtggtgccgagctgcaaagctggttccagcctcatcagccaagcgccaaaccgggtaaaactacgccgccaccattaccgccatcctgtcaggcgttgctggataaccacttcgcagggagatagtcattggattggttcactcttggccctgaggttctcggggtcttgtttttagtggcgctgctggcgggatttattgattccatcgccggcggcggcgggctattaaccattccggcgctattggcggtaggcgtgcctccgacccaagcgttggccacgaataaactccagtctgtgggcggttctttctcggccagcctgtattttattcgccgtggagcggttaatctcaaagagcaaaggctgactattgccctgactttggccggttcaatgctaggggcgattctggttcagcatatgcaggccgatatcttgcgacagattctccctctgctggtcatcggcatcggggtgtatttcctgctgacgccgagattgggagagttggatcgacaacgtcgactgtcagcgctgcctttcgcattaatcgccggtggtggcataggtttttacgatggtttctttggccccggcgccggctccttctatgcgttggcgtttgtcactttatgcggttttaatctggctaagtctactgctcacgccaaggtactgaacttcacctcgaatttaggtggtctaaccttctttattctcggtggaaaagtgttatggggcatcggcttggtgatgctggttgggcaggtgctgggcgcgcgtttgggcgcacatatggtgctaactcgtggtcagaaacttatccggccgatgatcgttgttgtgtctttggtgatgagttgcaagctactctatgataatcacggctcagaaattcaggcgtggctggcattgcagggcatcggctaatgctcgcttgttacgcggcttaatgggataatccctctttttccataagggcattattgctcactgtattgcctctgatgccaacttggcggaggcgtaatttgcggcttaccgggtatacacagcgtaatcatgtcagaaagtttatcgactcaaaaccatactcatcactatcaagaacttatcgatattttcaatcgctgtttcagcgaagaattcaacacgcggctggtgaaaggcgatgacgagcctatttatctgccggctgatgatcaggtggattacaatcgcattgtgttcgcccacggttactatgccagcggtatgcatgaaatttctcattggtgcattgccggcgaagaacggcgcaagcgggtagattttggttactggtactgcccggacgggcgcgatgcgctcacccaaagccagtttgaggcggtagaaatcaaaccgcaggcgctagaatggatgttttgcgtcgctgcgggtttccctttcaacgtgagttgcgacaatctggaaggtgactgcgagcccgatcgccttgcttttcaacgtaaagttcgtgaacaggtgctgcggaatttggaacagggaatatccccacgacctgcgggctttattcgggcgttgcaatcgttttacaatacgcccccgctggcggcggaacacttcccttatccggaagatttcgactgattgccagactgaccagaaagtttattgaggaagagtaatgatcgcagaatttgaatcgcgcattttggcgcagattgatgacatggtagagcacgccagcgatgatgacctgtttgcgggcggctacctgcgcggtcacctaacattagcagtggcagaatcggaagagcacggcgagcattctgccgagcagttacacgctcgcgttcagcacagtctggataaagccatcaaagctggcgaattatcgccgccggatcaggttttggtgttgggtctgtgggatcgcctattagcaaacgcgcagatttctcactagttttatcgctgccgtgacgctttaaggcatcatggcagctgcctttcattcagggcgcggtggattttgtaccggtctgcctttcagcagttttctaatccaaaaacgattcgggtttaatgcggacagcgttgaattattcagcggcaacggctcgccgaacatttgaccagccagaatctctgctatcagcggcgcactgcataatccgcgcgaccctaaagctccagccataaacaaatccggatataccggcgcggcttcgatcggatcgccgtttttgatctgctgttgtaacctctggtattgagtcagcgtggcctgatagtccggcactgcacccaccatcggtaaatggtcgcgaatggcgcagcgcacgccacagcgcgcctgattatctgaaacattcacctgctgtacccaatccacctgcggtaaacaacgcatcagacgatcgcgattttcttgttgctcagaggcactgaaaagggtggaggtttcaccgcgctgataactggctccgatacaatgctgctgattattcggattaaccggtgtcatataaccgtcgtagcagagtacgtttttcaatttgctgagggttggcgtggtgggaatatgggaaacctgaccacgtaccgccgtcagcggtaagaaacgagtttgttcccactggggtaagcgatggccggccgccagaatcaccgtgtgatgacgggtatctggctgattggcaaaagtcagctgccagcgattttctacccgcgtcagctcggtgacttcatgctgatagtggcagttcatgccttgttgttgtgccagagccatcagcgccgtggtcagttctgaagggcaaagccagccgccgtttggataatgaatgccgtcatgcccactgttcacacccgctcgctcagttagctgggcatggctcatggattcagcaaattctttcggccattgcgtgcctaaaatcttatcgattttgctacggcttttttcatcgtaagccagctggcttacgccgcaccactgatggtcgaaggccatgccttgttcgatcaatgcatcgtactggcggcgggcaaaggtaaaggcgctggtgtaaaaatcctctaacgcatcgccttttccgttcagtaacggataaatcgccccctgacgattgccggaagctccttgcgccggtttttcatcggcgcagtacaggctgacgttggctccgcgtcgcagcaaagaaagcgcggttagggcgctgacaatgccgccgccgataatggcgatatcctgaatgtcgctggcgaccgggcgggcataccaaggcgcaggatgtggattcatgtgattttccggcaaaaccccggtcagcatttcccttttttgcccaaaacctttgactttagcaacctcaaaaccggcctgcagcaagcctctacgcacgaagcctgcggcggtaaaggtcgcgaaagtcccccttgggcgagcgagtcgcgccatggcgctgaacagcaattcgttccacatatccgggtttttggaaggcgcgaagccgtccaggaaccaggcatcaacctgattatccatgctggcgtctaactgaggcagcagcgtattcacgtccccgaaccataaatccagcgtaatacgaccctgatccaacaaaatacggtgacaacccgccaggggcattggccactgggcgcgtagctgttcggaaaaagcagccaactcaggccagcggctgtgggcgacggcgagatctttcaggtttaacggatatttttcgaagcttatatagtgcaggtgctgaagcgatgcatcaggttgttgctgacgaaactgcgcgaaactttgccacagtgttaaaaagtttaggccagtgccaaaaccggtttccgcgaccacgcagcgagtggacgaatgctcgataaaacgctgtggaaaaccgtttcccttgagaaaaacaaaacgggtttcttccagcccatcctgatttgaaaagtagacgtcatcaaactgttccgaaacaggtgtaccctgatcgttccagctgagtgtggcggtttggatgggggtgttattcacgtaagaagactcgtatctcaaggggtagagggattttaacgaggtgttaccttgggtgcaaatcggaagataatctggtgatattacgctgatcggacttgttcggcgtacaactgtacgctaaagtgcattgcaaaatcccgaaagctaaaagtggaagaggtattaaatgaagcgtgcagtgattactggcctgggtatcgtctccagcattggtaacaatcagcaggaggtcctggcatctctgcaggaaggtcgttctggtattactttcgctcaggaatttaaagacgcaggtatgcgcagccatgtttggggcgatgtaaaactccagtctgagccgaaagatctgatcgatcgcaaggtgctgcgttttatgagcgacgcctcgatctacgcttatttggctatgcaggaagcaatttcagactctggtctgaccgaagagcaggtttctaacttccgcagcggcttggtagtcggttctggcggtggttcgccacgtaaccaggttgctggttccgatgccatgcgtactccgcgcggcctgaaaggcgttggcccgtacatggtgaccaaagctatggcatccggcgtttccgcatgtctggctacgccgttcaaaatcaagggcgttaactactctatcagctccgcctgtgccacctctgctcactgtatcggtcatgcggttgaactgattcagctcggcaagcaggacgtagtttttgctggcggcggcgaagagctgtgctgggaaatggcctgtgagtttgatgcgatgggcgccctgtccaccaagtacaacgaaacgccagaaaaagcgtctcgtacctacgataaagaccgtgacggtttcgttatcgcaggcggcggcggtatggtcgtagttgaagaactcgagcatgcattagcccgtggcgcacatatctatgctgaaatcgtcggttacggcgcaacttcagatggcgcagacatggttgctccatcaggcgaaggcgcggtgcgttgtatgcaaatggcgatgcagggcgttgatactcctattgattatatgaacgtgcacggtacttctacgccagttggcgatgtgaaagaactgggcgcaattcgtgaagtcttcggtgacaatacaccggcaatctcttctaccaaagcgatgaccggtcactctctgggggctgcaggcgttcatgaggctatctttagcttgctgatggttgagcacggttttattgcgccgagcatcaacatcgaaaatctggacgagaaagccgaagggatgaacatcatcactgagccaaccaaacgtgaactgacgacggttatgtccaacagcttcggttttggtggtactaacgccactctggtgatgcgtaaataccagaaataagccgtcccgagacttattacgccatcatttttacaatgattaaaattgaatcccgaactgattgcagttcgggattttttttatctctttatctctttatctctttggttattttcttaatccatatctatagttattgaggctttagatcgggaatgtcttttcattctaattatttgcattacggataatggaataagccgccgctgatgttacaacgtgccatcaagaccttgtacgttgctatcgggcttttttagcgataagcgccgtattcacattcctgccgtaggcttaactgcaaggatgtatccggtgaaaacccccgctgatttgccgctaatgaaactcgatgctcaacaagggaattaagatctaatcagtatttcttgggtcaggctctggttaaaattgcggcgcttgaagggattcattttatttcgttatcacaacgcgattcgcggtttttcgtcttaaagcgagaagcttaggttttatagagctcaaacgaacgggtgcattacaatgaaatatctgtttttattgatatttatactttgcgtgctttacattcattaccgcggacgagctcgctatcctttttggcgacagctttctgatcactccacctttgtggcaccgctcaatgtgtttatgtaccttttttctaaagtaccgaacacgccatatttaaaacccgaaacctttcccgaattacagcagttacaggccaactggcaaaagattcgcgaagaaggtgaatccttgatggcgatacagcagattaaggcttcggataaatataatgatgccggttttaactcgttctttaaaaccggctggaaacgtttttatttaaaatggtatgaggataatcatccttcggcgatgagtctgtgtccgtttacgacggaactactgcgtggattaccttcggtgaaagcagccatgtttgcggaattacctgatggcagccgtttgcctcgccaccgcgatccctatgctggttctttgcgctatcaccttggtttgattacgcccaacgacgaccgctgttttattgaagtggacggcgaaccctatagctggcgggatggggaaggggtattgttcgacgaaacctatctgcattttgccgagaataaaagcggcaagaaccggctgattttattttgtgatatagagcggccgatgcgttatcgctgggcgcagcgggttaatcattggtttggtcggaatttaatgagtgcggcaaccgcgccaaacagtgatgaagatcgtactggtggggtgaatcggttatttaaatatatttacgcgatacgtaaagtgggtaaacgattaaaagcctggaatcgacgagtttactatctgattaaatgggtattatttggtggtatcgcaggattgattttcttctctttataactgattttcgtgatgatagaccaataaagtaaaactaagctggggcaatcagttgccccatcgctattatcttttgcttttagggatcttcgcggccagttattagcttaacgcatatttagcggcggtttgagcatgaatggcggtggtatcaaataccggtactgaggcatcttcagcgtttaccagcagagtgatctcagtacagcccaaaataatacccttggcgccttgttgttccagtttggtaataatccggcggtattctgctctggatgtttcgttgatttcacctaaacaaagttcctgataaataatccgattgacgatttcccgatccgcatcgtcaggcaccacgacctcgatattatgcctttcggttaagcgcccacggtaaaaatcctgttccatcgtatagcgggtacccagtaacccaatttttttcaacccctgttgcttaatctgcgccgcagtagcgtcggcaatgtgcaataacggcaagccgctggccgcctcaatctcatctgccactttgtgcatggtattggtacataccacgatagtttcggcaccggctttttttaaagccactgcagcattagccagcaggcgagccgctgcctgccaatcgccagatgattgcatttgctcaacttcatgaaaatctacgctataaagcacgatttttgccgaatgaagaccacctagatgttgcttaacatattgattaatcatccggtaataaggaatagtggattcccaactcattcccccgatcagaccaagagttttcatctattttcctgccagtagtaaaagtgaagccgttgccagccagatcgaatttatcttttgataaagtcgggcgtaataaaaccaggtggacagatagcgcggagcaattcgtaaaactgtgattaggctccacctttgccgcaagtgccgaactatgatggtcgttgtaatatttatatataaataaatagcattatcaaaactatataaattaaacctcggagcctgggatgataaaagtgaaaaccgccgcatcgttaactttgcttgccctgttattacctgctgcagaagtggccttagcgcaggatcggggcaataatgttcggtctgaacaaaacggttatcagttggagcaggtattggtaatgagccgccacggtattcgtgcgccgttggttaactatggtgatattttgtctagcgcgacgccatttcaatggccgaaatgggaaacgcccggaggattgttaacgccaaaaggcgcggaagttgaggctattttcggcggttacttccgcgagtggctggtgcaaaataaattactgacagcgcagggttgcccaggagacggcaaggtatttacctacgccaatagtttgccacgtactatagatacggctcagcatttcctatttggggcttttcccggctgtaatgtaccggtgcatcaccaaaaagacattggcaaaatggatccggtatttaatcccataattaccttggatgtgacgcccgaatttaaagctcaggcattagcatcaattaatcagcacgctggccccggtggtatagcaggactcaatcagcgtttgcagccaaattatcaaatactgtcgcggatattggattttaaaaactcgccgtcctgtttgcaggataaaaaatgtgattggagcgagcaacccaacgtaatttcactggtgcaaaacaaggaaccgggaatgaccgggccgttgaagttgggtaccggcgcgtctgacgcctttatgctgcaatactatgagggtttcccgctaaaagacgtggcttgggggcgaattgcttcgccggaagagtggaagcaattgcaggaaataaaaaatcgatatcatgaaaccttatttggttcaccggcaatagcggataacgccgccgagaaactggttaattttattcatgctgctttagatccggtgggagagaaaacgccaaatgagcaactggcgcagcaagctaaattagcggtgctagtagggcatgattctaatattgcctctttgctagccgccataaaaaccaaagactatcaattacctaatcagtatgagaaaacgccgatcagcggaaaagtagtatttgaacgctggaaagacacaaaaaataataaagatctgatgaagattgaatatatctatctttcaaccgaacagattcgcaataaaacgccgctgagtttgcaagcgccgcctgagcgcgtcacgttggaaattgaaggctgcccaattgatgcccaaggtttttgctctatggacgatttccgacaggcaatgaaggaaaatactcatatctaaacgactattcgcggcaggagagtaactcctgccgtattttactgctccggctctctcggttaagctgaggctaatctcctctcaatggtcaacgctttctatgactggatcaatttctctgcgtaccggcctgaatactttatttaaaccttttttacgcgatcgtctgctgcatattttactgctggtggggattggactgagtctctggatgccagagaaaattcacgctttccctgattatatcgattggaccaccatcattaccttgctgggacttatgctgttgaccaagggcgtagaggtgagcggttattttgattttattggccgtaagataattaataaactccacactgaacggcatatggcgctgtttttggtattatcagcggctttgctttcctcatttctcaccaatgatgtcgctctgtttatcgtggtgccgctgattctgaccttaaaaaaaatgtcatcgctgccggttagtcggttaattattttttcagccattgcggtcaatgctggttcgttgctgacgccgattggaaatccacaaaatatcctgctgtggagtcaatctgagctgtcatttttaacctttacgcagcaaatgctgcctttagctgcggcaatgttaatgacgttatttgggctgacttggctgtttttccccgctcgtcaaatcagtaagcgtcgtgatactccagaatatccgtatcaatcgggtttattactgagttgtctggtgctgtatattttgtttgtggttagcgtcgatttaggctggggtctttatgggttaatggcggtatcaatcgggctattactgctggccagacgggtattgttttatatcgactggagcctgatttttgtgtttatggccatgtttatcgatattcgactattgacggaattaccggcgctgcaaagcctgtttggtggtatcagtacattgccaccatcgggtatttatctgcttggaatcggttcttcgcagatcataagcaatgtgcccgcgacgatcctgttattaaattacgtgccttccagtgctttgctggcttatgcggtcaatattggcggcttcggattagcaattggttccatggcaaatcttattgccttaagaatggccaaagagcctagtatctggctgaagtttcacgcattttcactgccgttattactatggggagcgctggtgggctgggtgttgctgtagctgactcaggggtaatcctgagccaaccaatcatcagataaacagtataaataatacgacgaaggcgataatcaaagcgataaaggccaacgagggctttttcagcagtggttgcaacggagcaggcagtgcggcgataaacggattgtaaatcggctgaatcgggccttgttcgtcgctgcgctgtatcgttattgcgcgatccaagcggttggaaaatagcacgttaatgacatcgttaagctgagcctgagtcaacggcgtggttgggctggcctgaaaacgatgctgagcataatcggttaacagtttctgctcagtgctatctaccggctgtttcaatgcggcttgcaggcttactagcgttggcgcggcctgctgactgagggcgactttggtctgtaagaactggctcataagctgaaaatgacgagcgggaagcggatcggtatgcttaataccaatcatctcaaatagcccttgccagattttagctggctgttcaccggttgcagcgctgagtttggtgaccagcgattgcaggctttggtgctcggcgggtaatagcgggcgatcggttacggcggcaagctgcggctgcgggatggtcagcgtaccggattgcagtagtacgaagacttgctgtaattgctgatggcttagctggctgagcaccgtatggccaaagttctgccgaataaagtcgctgactgcctgacggttattcccttgaggtagtagttcggtcaactgttggcgtaactggtgattagcgtgattttcctgcgcctgacccaaacgggtttgcagcaactgttccgccggctgaaaatgtcgtgccagcagctctgcggtattagttaatgataaatcgtggcgtagggtagcccatatttccgccgactttaccggcgtgagcgccataattcgtacgatcagcttttccagcgtagtacgctgagccggagttaacgcctgatcgtcaccgctgttcaacgggctggttttgttcggcacagcggttgtggtgcgatcgctggctataggggcgccggagccgtttaaaggttgcatttcacccgtccttcgctaggaataaaatcatggttacccggcgattggcgcaggctggggctataatacctgtaaatttgtccaatcaatacagtccggcttgggttttattagatgaatgtttatgttgtgggcattgataatcttaattatgtcgctaagatgagtacacaacgaaaaatagggcttaaatggttcatcaacaacgcattgcaaaatggttcctctgtctggcttgtctggtcgtactagtatgtatgactcagcgcatggctagcatgcacgcgttagaacaaaatttcggcctgacttccctgagccagacggttgacgacgagcaaacgtcacaggcaccttgtgagctaagtgctaaatctctcttggccgcgccaacggtgctgtttgagctgacgtattttgctttgggattattgttactgttattggttccaatctctccgtgcgtgatgcggtttccgccgcggcgcgccatttcacccagtcgattaagggtgcacctccgattttgcattttccgggaatagcgactccgccagttgatttggtgtgattaatctatttttggagaaaagtaatgcgcaatattttcaagacagccttgttctgtctttcgctgctatggctgcccagtctgtgggctgcggatagcggttggctcatcagtccgctcaatgaccatgccaaggtacggctgcgcgctgaacctaccgccgaaggcgatacgcgcctattgctgtcggtcgcgttggaaaagggttggaaaacctattggcgttcgccgggcgaaggcggtattgcaccgtcgatacgttgggatcatgcgccagcccaagtgacatggcactggccaacgccgcaacgctttgatgtatcaggaatctctacgcaaggctatcaacagcatgtctccttgccgatagtgatttcgggtacgtcggattcagtgctatcgggaacgctgaccctatcaacctgtagcaacgtctgtattttgacggattatcctttccgtttggatctgagtaaaaccggctccaatccgcgttttgactacgatttcgcgcaagccttagggcaggtgccgataaccagcggtctggtcgatgagatttccgccggttatggtaacggtgaagtgcagattttagctcagcgccgtgcgggttggcagcagccagaactgttctttgacactctcgatgatgctgatttgggcaaaccggtgattgccatttctggtgagcaactggtggttcgggttccggctagcgatggctggggtgacagcgcgccggatctgcgtgggaaaaatctaacgctggtgatcagcgacggcggcgtggcgcaggaagccaccgttaaactggggaatagcgtttcgctgcctaataccgccaccgcctattggcagtggattttgatggcgttggccggcgggttgattctgaacctgatgccttgcgtactcccggtactggcgatgaagttaggctcggttttgcaggttgaaaaccaaagccgcggtagcgtgcgattgcagtttatttcctcgtcgatgggaattcttttctcgttctggctattggcgttgctgatgaccgcgctacgtcttggcaaccacgccctcggctgggggattcagttccaaagcccgtggtttatcggctttatggtgctggtgacggcgttattcagcgctaatctgtttggtctgtttgaagtgcgactttcttcctcggcgacgacccgcattgcgactcagggtggcaacggcttgggtgggcatttctggcaaggcgcattggcgacactgctggcgacgccttgctccgcgcctttcctcggcacggccgtggcttttgcgctcgccgctccgcttccggcactttggggcatttttactgcgctcggggttggaatgagtctgccttggttgttgatcgccgcctggccgaagttggcgttgtgcctgccgcgccctggccgctggatgaaccatctgcgggggatattgggactgttaatgctggcgtcctgtttgtggttaatcagcctgttgagcagccatatcggcatcctgtggaccgggattattgccggtattttcctgttggctttgttgctggctattgggcgtcattatggtgtgcgtattgccgctattgtcagtctaatcagcctgttagtgattggcgtggcgttgctggtcggcgcgttaaccgcggatctgtggcgtaaaccgctgcacgatcgtgtgccatggcaaccgctcagtgaaactgcgattcagcaggcgctgaaggaaaacaagcgggttttcgtcgacgtgaccgctgactggtgtgtgacctgcaaagtcaataaaatcaacgtattgatgcgcgatgacgtgcaaaaggctctgatggaggatgacgtagtcgctctacgcggtgactggacgcgcccttcgccagagatgacggcgttcttacgtaaacgcggcagcgttgccgtgcctttcaatcaaatctacggcccaaatagcccgcagggcgtggtgctgtcccctctgctaagccgtgaatctctgctagacgttttagccaccgctaaaggaaataaatcatgaaaatcgtcactctgttggtactttccctgataactgcgccggtattcgcggcaccttttactccagagcaagagctgcgtattaaagaattgatcggagaaactctgatttctaatccggaaattctggaaaaatcggttaatgcgtggcagcaaaaggctaacgatgagcaaggtaagcaactgagcgccttgattaaagccaatgaaaaagatctgtatcaggacccagctagcccgcgtttgggagcggaaaatccgaagttaacgctagtttcctttaccgattacaactgtccgtattgcaaaaccttcgatccactgttggaaaagatcgttaaaacctatcctcaggtggctttagtgatcaagccgttgccatttaaaggcgaaagttcagtacgcagcgcccaggtggctctgacgctgtggcaacagcatccggagcaatttttaccgtttcatcagcgtttgatggcgaaaaaaggtttccatgatgcagcgagcatcgctgctgccgagaaaaaaaccggcgtagttgcggtggaacccacggagcagagcctgaacgtattgcggactaacctgcgtctggccgatcaactgggtattcaagggactcccgccacgttaatcggcgaccaaatggtgccaggggcaatatcctatgatcaactagaagaaattgttaaagcgcaactggcgcaggcggaaaaatgagccgactgaaacgttggagccgtgagctgctaatcctgctggcggtggtgctggcgttgaccgttgctatggattggctgcgcagcccgcaggcgccgccgagctgggcggaggaatcactggtcactctggatgggcagccggtgtctctgaaagcgctgagtgaggaaaaaccgctgttggtatatttctgggccagctggtgtggcgtatgtaaatttactacgcctagcgtgaacaccctggctgctcaaggggaaaatgtgatgaccgtagcgctgcgctccggagataaccagcaggtagaaaagtggctggcaaagaaaggtcagcgtttgccggtggtaaacgatccttcggggcaactctctgcccaatggcagataggggttactccgaccatcgcaattttatatcgcggagaaatggtcagcagcaccagcggctggaccagtttgtggggtatgaaactgcggttgtggtgggccagtttctgattaaattaagatagtaaaaatccgatagtacattggactgcatcttattcagttggatatccactgagtaaggtgcagttttttatccaatactggcgtagcctgaatagactttggtaaccgccattaattaacagccccccattcagccaattttgtattccatgcggtatattctggtgaggggagtttgaagaaaccaatggaatatctttcaggcgtagcctgaagcaatagggtacacaccagatcctgaagccaggtcgtattttccacattttcaaatttctgtatatctttaagcttatttattgattcatatacataaatcaatgaatctcttatgttttgatatttctcattctgagcagcgtgtttgttagggaaaataaaacttgcgactttccaccaaaaacttttaggggaattatgtatttttaagttgtttactgcatctctgatgattggttgcaatcctgttttactgctcagtaatagtggtggctggttttttaattctagcaatgctactgaatcagcatcgaatttgctgaagtgagcgttagtatactcgtcaatggttttttttgtttttttctagtgtttggtaatcaccttcaagcatatctgctttagaaagggctaatgtatggttgattgtgttggtgttttttatatctgattggtaattgccattaagccttatgtttaataaggttttaaaaattttactgatttgagaacatgttaagtataatttataactattctcaatatcacttttcaatttttcaatgtcagcttgagttggcacaaattctttaataattaactgcggttcttcaatggttgatattggtaacggatgcttacgtacttctattttaatatttccacccagaagtctattaaacgctttagctattctggtaattttgaatattctgttcagtgcgccattttggtttaagatatcatctaatttattagagagagttccactaccgtgaccttttaatatttgttgaattagttcggctattttttccggttctgtcggtaaatgccttactctgactatgtttttccctgaaatctcaggtagctctatatatttatgaatatctttattttcattattaatttcgcttaacagataaccgatatgtaattcttgatttttaggggtgtcaatatactcttgcaaccagtttctaatgtcgtttcctatagcactgatggttgcatcatcaagtttttcgtttatttttattcttgttggcaacgcgtcatctattgatgaagttgatggttgttcaattctgtgttttttggccaatgcatggtagttatgaattgacttactcatattcccaagcttgtttttctttgatgtattaaatacattgattgattttataaatatactgtctttgttcttgttttgattcttttgggttttacttaacaaggaaggtgtagatgtttgattgattttttggagctttgaaccaaatccactacgcacttcatcggagagaggctttaataccagttgtgtactattcgttaagtttgtcacttttggcatagtaatcatctcatatttattagtggagatgatattattgctaaacattattaacaacgctttcaagaagtgattattttattagataattaactagtatattagatgtctatgttcagggttgagagtgaaaataatagtattgcagagaatttcatttgctgacatttcgctaatgcggaacagttttcatttattggtattgcgaatgaaaatatgccgtcccagccagaacaaaaatcgctccaggctggaaggcatgcaccggtttttcaatcagctagcttttattcgtttgctgattggtggttgattcaaccttgatttcaataattggcgctggggttttacgtagtggaatccgcagacgttgcgccagaatgacaccggccagtgtaattcccccgccaatcaggtgatagctgtgtaattgttcgtgcaggaagcttacggcaataatggcggtgaataccggagtcagattcataaaaatcgatgcggtattggcacctaaacgcatcacgccgtgaatccacaggtaaggcgcgataattgacgcagggataccagcaaatagcaccaacggaatattttgcgcggtaagctgcacatcgcttgccagcaggaaattagggattaacaacagcacaccaaacacaatctgcatgtacagagattgccagttaggtagctgaatattccagcgtttggtgagtacgccgtacagagcgtaagaggtagaggccgccagcatcatcgcctcaccttgaccaataccgtgctgtagcaactgcgccggatcgccagcgctcaccagccacaccagtccacccagcgataaaatactgcctaaagcgatgcctactgtgggagcaacccgcagtacgacaatactgattaatacggttaacaacggaataagcgagctgagaatccccataaacagggcgctaacgctgtgtgccgcataataagccaggctttgatacaacaccattcccagtaggcccagaatgaacagtttccaccagtaaaccttaatcgccggccagttgcgaatcacgcccatgagtaaaaaaggggtaagggtgataaacgccagtaaccagcgatagaaagagattgccgctgggtcgatagccgtggcagagattttactgaccacggcattgaccgaccaaatgatcaccgcgaacagagggaaaagcacattcatgataactattctcatttaaactaacttgtacgctagtctactcctgtctgatttattatatatactgataatcggacaagattcagcgcaattaagacatttgctcggtagcgaacgccttagccacaacaatctgattaaccatggtgtctcaatgatggcttcttccttgctacccaaggcgctggctgcgccacctaaaaccctgttgctccgttgtgaggaactcaatgctgatacggagtttttgccgcattctcatcaatatgggcagttaatttgcgtcaaatctggcgtcgttgccatgagcgtcggtgggcagcgcttccttgctccgccagagttcagcctatggatacctagcggaatggagcactctagctataatcggcggccaacccaatatcgggccatagatattgcgttggatttatgcaaagagctgccggattctccctgtctgattaactttagcccgatcattaatgtcattctggaagattgctttacgcgcgggatgtctgcgccgcagacgccgcaggatcaccgtttggtgcaggtgttgatcgaccaactgaaaatatcaccgatacaacgcacttatttgcccacctcgcaggataaactgctggcacccattctatccgcgttggagcgctgtccgtcagacaatacgtcgttatctcaatgggctaaacgggtttacagcaccgagcgcacgttatctcgccgctgccagagggaattaggcatgccttttagcgagtggcggcaaagactgaggtttttacatgctatttctctattagaacaaggaaaaaccgtaaatagcgtggcgttggaagtgggatacagctcggcgtcggcctttattgttatgttccagcaaatttcaggcaccacgccggagcgttatcggcgcggacaatagattttccgaagaaagcctcagttataacgttgggttcgagttcattcagtggcaaaatagcgcccatctttttcatcggtatggcagcgcgctgtcggagagcaaagtgaaaattctggttgatgaaaatatgccttacgccaaggacctgttccagcgtttaggtgaagtgcaggcggtgccggggcgaccaattccccttgaggctttgacccacgcggacgcgctgatggtgcgctctgtcactaaagtcaacgcggaattgttagaaggcactggcatcggttttgttggcaccgctaccgcgggcacggatcatgtggatgaggtctggctacgtcagcaggggatcggtttttcggcggctcccggctgtaatgctctcgcggtggtggaatacgttttttctgccctgatgatgatggcggagcgcgatggattccatctgcgtgataaaaccgtcggaattattggtgtaggtaatgtgggggcgcggcttaatgcgcgcttgcaagccttaggcgttcggacgttattgtgcgatcccccgcgtgcggatcggggggattcagaagaattctggccgttggaaaaactggtgcgggaagcggatgtgctgactttccatacgccgttaaacaaaagtggcccttatcaaagcctgcacatggcggaggccgagctgctggccgcactgccggataaccgtattctgatcaatgcctgtcgtggtgctgtcgtcgataacgcggcgctgctgaaggcgttggaaaaaggtaaaaaactcagcgtggtattggacgtgtgggaacctgagccagagctatcgctgccactattggcgcgggtggatattggcacgccacatatcgccggttatacgctggaaggcaaggcgcgcggcaccacgcaggtatttgaagctttcagccggcatattggtcagccgcaatcggtggaattgtcctcattgttacctcagccggaatttagccatattcggttaaatggcgggttggatgaaggcaaattaaagcgattaatgcacttggtgtatgatgtgcgccgcgatgatgcgccgttgcgacaggttgccggtattaaaggcgaatttgatcggctgcgtaagcattatcaagaacgtcgtgaatggtcatcgttgtgcgtacagtgcgacgatgaggccagcgcagaattactgcaaaaactgggcttcacgactcagcttttgtaggcatttcagtttgtcagcgagttaaacgctgcaaatgacctgaatttagattatcaaggcggtattgaccgcctctttgtatttgaacgaattattgtggagaaaaccaacatgtctgacggctggaatattgctctgttaggagcgacgggcgcagtaggtgaagctttactggagctgttacaagagcgccagttcccggttggtgaattgtatcctctggccagcgagcgtagcgccggagccacggtgcgtttcaatggcaaaagcctgctggtggaaaatgtggcagagtttgactggtcgcaggcccagttggccttctttgtggcaggcagcgaagcctctgcgctgtatgcggaggacgccggtaactccggttgtctggtgattgatagcagcggcctgttcgccatggaacccgacgttccgctggtggtgccaagcgtcaatccgcaggttctggccgattatcgtaaccgtaatatcgtagcggtagccgatagcctcactagccagttactgacggcaatcaaaccgctgaccgagcaggccggtttgtcccgtttacacgttaccagcctgatttcggcttctgctcacggcaaagccgccgtggatgatttagccggtcaaagtgccaaattgctgaacggtattccggctgaagctgctatcttcccgaaacagctggcgtttaacgtcttgccactgctggcggacgaagagggcagcgtgcgtgaagagcgccgcttggtcgatcaggtgcgcaaagtgctgcaagacgaaggcctgccgatttccgtcagttgcattcagtcgccggttttctacggtcatgcacaagtggttcatttggaagccttgcgtcctatcgcttctgatgaagctcgcagtgaactggaaagctgtgaagatattcagttgacggaagaagatgatttcccaacgcaggttagcgatgcttctggcagcaactatctgagtattggttgtgtgcgtaacgattacggtattcctgagattctgcaattctggtccgttgccgacaatattcgcttcggcggcgcgctgatggcaatcgaaaccgcagagcgcctgttgcaggagcaactgtactaatgtctgagcttgaattatccccgcagccggagcaggcggcgggtctgaagatcgcgctgggcattgaatacaacggcagccgctactttggctggcagcgtcagcaagaagtggccagcgtgcaggcctgtctggaagcggcgttgacccgagtggccaacgagcctatcaccgtgcagtgcgccggtcgtactgacgcaggcgtgcatgcaaccggtcaggtagtacattttgtcacctcagcggtgcgaaaagatgcggcctggaccatgggcgtcaatacccatttgccaccggatatcgcggtgcgctgggtaaaaaccgtcagtgaagatttccacgcgcgtttcagcgctaccgcgcgtcgctatcgttatgtgatttataaccatcgctatcgtccggctattttggcgcagggcgtgacccactgctatatgccgttggatgcggaaaaaatggcgcgcgcggcgcaggcgctgttgggggaaaacgattttacctcgttcagagcggtgcaatgccagtcccgcacgccgtggcgaaatgtaaaacatgtaaaagtttcccgacagggcgcttatatcgtggtagatatcaaggccaacgcatttgttcatcatatggtgcgaaatatcgttggcagcttgattgaggttggatgcggtaatcaagacgaaaactggattgcggagctattggcgctgaaagatcgaaccaaagcggcggcaacggcgaaggccgaagggttatatttagtggcggtagattatccggaacattttgatttacctcaggtacctatggggccgttgtttttggctgacgatgagttcttagctgtgaaaagcttttagctaagcatggtttttagctgagaataacttttggctaagaaagactttgggttgagaatagtgtccgggcgactagtcaatatatttagagcaactcatctacctgattcaggtgggcggcggtgcgctcgctaattgagagtgtttatggaattcatacggttcgttattgattttattctgcatattgatgtccatctggcagagttggtagcgcagtacggtatttgggtttatggcatcctgtttctgattttattctgtgaaaccggtctggttgtgacgccgttcctaccaggggattccctgctgttcgtcgctggcacgctggctgcattgccaaccaacgatctcaatgtacataccatggtggttttaatggtgatcgccgcaattatcggtgatgcggttaactacactattggccgcgtatttggtgaaaagctgttcagcaatcctgattcgaaaatattccgacgcgcctatctggataaaactcaccagttttatgagaaacatggcgggaaagcgattattttggctcgatttgttcctatcgtgcgcacatttgcgccgtttgtcgccggtatgggtaaaatgtcctatcgtcactttgcggcgtataacgtgataggggcgttggtatgggtgttattattcacctatgctggttatattttcggaaacgtgccttttgtgcagaacaatctgaaattactgatagtagtgattattgttgtttccattttgccgggtgttattgaggtttggcggcatcgccgcgcggctacccgccagaaaaataagtaaaaatgttgcagtaaccaagggttcgaccagttttttatccacagtgtcgggccaatatggtttaatgtgtaacattaatggtctgttcctgcggacactccgagaacctgtgcctaatcacgcttcgttggcgtggtgtttgggcactttttgttggcagtgttttcagggagatggttacagcatgaacagcggactggcatcggccaggttcaaacagaaaggtcatcgatgagctggattgaacgaattcttaacaaaagcaacatcacgcaaacccgtaaagcgagtatacctgaaggggtgtggacaaaatgcgatagctgtgggcaggttctgtaccgcgccgagctagagcgtaatctggaagtttgtcctaagtgtgatcaccacatgcgtatgtcggcgcgtcagcgtttacatacattgttggatgcaggcagtgaagttgaactgggcagcgaactggagccgaaggatatcctgaagtttaaggattccaaaaagtataaagatcgcctttctgcagcgcagaaagaaaccggtgaaaaagacgcattggtcgcaatgaaaggcactttgtacggtatgcctatcgttgcggcttcctttgaattcgcttttatgggcggttcaatggcttccgtagtgggcgcacgttttgtccgcgcggtagaacaggcattggaagacaattgccctttggtctgcttctcctccagcggcggcgcccgtatgcaggaagcgttgatgtcattgatgcagatggcaaaaaccagtgcggcgttggcaaaaatgcaagagcgcggcttgccttacatttctgttctgaccgatccgaccatggggggcgtttccgccagcctggcgatgctgggtgatattaatatagccgagccaaaagcgctgatcggctttgccggcccgcgtgttatcgagcagaccgtgcgcgagaagctgccaccgggcttccaacgcagtgaattcctgatcgagaaaggcgcgattgatatgatcgttcgccgtccggtcatgcgtgaaaccttggccagcattctgtctaaactgaccaaccagccgcagcctatcgtggctgaagccaaaactgtcgtagtcgaaaacgacgatgcagtagaaggctaattcggcctgcgggcatcacttttaccgagtgatgcccgattatcgctgacagaaattgcgagctaaaggttgattaaccacagggtaatttaaccggcgtctgtcaggcgttctgcctggcgaacaccatggaatgaatccaaggccagtgacgggactcatgaataatcatcaaatcccccaagccacgtcgcctttagccgcgtggctttactatcttgagcgtttacattttcaggccattgatatgggtctggagcgtatcaaacaggttgccgagcggctcgaactgctaaagccggcgcctatcgttttcaccatcgccggtaccaacggtaaaggcaccacttgctgtacgctggaagcgattttactcgccgccggtttacgagtgggcgtctacagttccccacatttgctggaatacaccgagcgggttcgcattcaaggccatgagttgcctgaatctgaacatagccaatcttttgcctatatcgaagccggtcgcggcgacatttccctgacttattttgaattcagcacgctatccgctttgcatctgtttaaacaggcaaaactggacgtggtgattctggaagttgggttgggtgggcgtctggatgcaaccaatattgtggattcagacgtcgcgggcgtaaccagtattgcgttggatcataccgactggctgggtgcagatcgcgaaagtatcggtcgcgagaaagccggcgtattccgcgccggtaagcctgcggtggtcggcgagccggatatgccaaactccatcgccgctgtagctaaagagttgggcgcgcatttgtatcgccgcgatgaagcctggaaatttagccaacaggattctagctggaactggcagtgcggagcctctgaactaaaggatctgccgttgccaaacgtccccttggctaatgcagccacggcgttggcggtattgcactattcgccgctccagatcgctgaggaagctatccgtcaggggctgatcgcggcgcagttaccggggcgtttccaaattgtcagtgaacgacctatgctgattctggacgttgctcacaatcctcatgccgccggttatctcgccgatcgcctgtctcaattaccggcgacccagggtaaagttcgcgcggtagtggggatgctggcggataaagatatcccaggtacgctggcgtgtttaagcccgcaggttgatgaatggtactgtgcgccgctggaagggccgcggggagccagcgtggcagctttggcgcagcatcttgaagcatcgcggcaatttaccgatgtggcaacggcgtggcgtcaggccatgcaggatgcgacagcggaagacgtggttatcgtgtgtgggtctttccttaccgtggctcatgtgatggaagcattgaaaacggggagtgtgagtggccagtaaattccagaaccgtttagtgggtaccgtcattttggtggcgctgggcgtcattttattacccggtttgctggatggtaagaaaaagcattatgaggatgagtttgccgctattccattagtacctaagcccggcgatgcggaagaaatcgacgtggtgccgccggtgaaccagcctttaccgacgcagccgccagaaggtgcagcggaagccctcggagccaataaaggtgaagaatcagcctctcaggcagctaacgatgcaggtagcgttgcaactccgccactggtcgtcagtaagcctattgaaactaagcctgtaccgccaaaaccggtagaggttaagccgatagaagttaaaccgatagaagttaaaccaatagagaagaaacaggccgcgcctaaaccggttgaggtgaaacctaagcctgaagttaagccgatagaaaccaaacctgaggcgaaagtggaagaaaaagcgccgacaggacaggcctatgtggttcaactgggggcgctgaaaaacgcggccaaagtgaatgagatcgtagcgaagttacgcttatcgggtcatcgcgcctataccgtgccggctacgccggttcagggtgaaattacccgcgtattcgttggcccggatgcttcaaagcagaatttgcaatcggcgttgcctgaactgaatgccctaagcggcctgaacgggcaggttaaggcatacaataccggccgctaaagtgatttacccttgtcccgccgcggtagaacgacggctggcaaggggttatagctaagtttgtgcggcgattgttgtttttaaaatcgccgcactttatttatcggagcgcaggaattcccctacgcaaacgttttctttttctgttagaattcgccgcgaacaggatgtaggggcgatttcatcattggaatagtcatggtttggattgattacgtcattataggaattatcgggttttctgctttagtcagcttgatccggggttttgtccgtgaagcattgtcacttgtgacatggggatgtgcgttttttgttgccagccatttttatgcttatcttgccatttacttcacgcgttttgaagacgaactcgtacgcaatggcatcgcgatcggcatcttgttcattgcgacattgatcgtcggagcaattgttaactacgtgattggctcgctggttgagcgtaccgggttatcgggaacggacagagtgttggggatctgtttcggcgcactgcgaggtgtgttgatcgttgccgccatgctgttctttctggatacctttaccggcttctcacaaagtgaagactggaaacagtcgcagttgattccgcagttcagttatatcatcaggtggttctttgactacctgcagagcacgtcgagtttcttgccgaatcaattaccgattcggagcggcttatgaggaaagacacatgtgcggtattgtcggtatcgccggttttacaccggtaaaccagtcgatttatgatgcgttaacggtgcttcagcaccgaggtcaggatgccgcaggcatcgtcaccattgatgccaataatggattccgtctgcgtaaagcgaacggtttggtgaaggatgtttttgaaacccggcatatgctccggctgcagggaaatatgggcattggtcacgtccgctacccaaccgccggcagctccagcgcctctgaggcccagcctttctacgttaactcaccgtttggtattacgctggctcacaacggcaatctgactaacgctcaccagctgagaaagcagttgttcgaagtctcccgccgtcatgtgaataccacttctgattcagaaattctgctaaatatcttcgccagcgaactggatcgcttccaacattatccgttggaaacagacaatatttttgctgccgttgccgccatgcatcagcttattcgcggtgcttatgcctgcgtagcgatgatcataggccacggtatggttgctttccgcgatccgaacggtattcgccctttggtgattggtaaacgcaccctggttgatggccgtaatgagtatatggttgcctctgaaagtgtggcgctggatacgctaggctttgaatttctgcgtgatgtggctccgggcgaagcggtgtatatcaccgaaaaaggccagttgtttactcgccagtgcgcagaaaatcctaagtacaatccttgcttgttcgagtatgtctattttgctcgccctgattcctttatcgataaaatctcggtctacagcgcccgtgtacgcatgggtcagaagttaggggctaaaattgccaaggaatgggaagatctggatatcgacgttgttattccgattcctgaaacttcctgcgatatcgcgttagaaatcgcccgtattctggataaaccgtatcgccagggttttgttaaaaaccgctatgtgggccgtacctttatcatgccggggcagcaggaacgccgtaagtctgtgcgccgtaaactgaacgccaaccgcgccgagttccgggataaaaacgtgctgctggtggatgattccatcgtgcgtggcactacgtccgaacagatcgtggaaatggctcgcgaagccggagcgaagaaagtttactttgcttccgctgcgccagaaattcgtttccctaacgtttatggcattgatatgccgagtgccaatgagctgattgctcacggacgtgaggttgacgaaatcaaacagctgatcggcgccgatgccctgattttccaggacttaagcgatttgattgacgcggtaggtgaagacaatccggatattactcagttcgaatgctcggtatttaacggcatttacgtcactaaagacgtcgatcagagctatctggaatatctggagtctttacgtagcgatgacgctcaggcgttgcgtagtcaaaatgaagcagaaaaccttgagatgcataacgaggggtaattctccgcacgctatttcgctggttcagtagcgttgcagcgttaagtgccaaggggctttctgggtattaaaaaggtgcaaccggctaatcaaagcggtgcacctttttttgtcatatcttgctaatatttctgtgatacggcacagtttgtccctattccattatttttccgcatttttctttgaatacgcggccagtttgaggcagttcttcatgaggcgacttattatcggtatttccggcgctagcggggcgatttacggcgttcggctattacaggtgctgcaaagcgtcgctgatgtggaaacccacctgattatcagtaatgctgcccggcaaactttggcgctggaaacggatctgagcctgcgagatgtacaggcgctggccgacgtggttcacgatgcccgagacattgctgccactatttcctccggttcctataaaaccacaggcatggtgattctaccgtgctcgatcaaaaccctatccggcattgtacatagctataccgacggactgctcacgcgtgctgccgacgttgtgctgaaagaacgccgcccgctagtcctgtgcgtgcgtgaaacgccgctgcacttaggccacctgcgcctgatgacacaagctgctgaattaggagcggttattatgccgccggtgccggctttctatcatcggccaaccagcgtacaggatattatcgaccaaaccgttaatcgggtaatagatcagtttgatatcgaattgcctcaggatctgtttgttcgttggcaaggctcaaattaacaatatttccccaaattgatacatttgtgcaacatcgcactaaaattaaacagattatgcaccacaatgatcctgcttagtttcctgcgtagttggacgaatttcgcattttgtcctgtttgcgggcgctgacgtctttcgaactgtcgattttagtggttatcgcgctgataatgggactgatggaaatcctttcattattcgtcattactggcacgattactgcaaattgatttacgaaagctcagggacgacaaaatagcaacgtactccgtggcatcgaaaatcaatttgagggtaatgtatgaaaaagcagatattggccatttctatggtactggctctggcaaccgccagcagcgcctttgctgccatacctaagacgttgaaagtaggcaccgatcctacttatgcgccattctcgtctaaaaatgccagcggtgagttggtgggtttcgatattgatttagcgaaagaactctgtaatcgcattgatactaaatgcacctttgtcgacagcgatttcgatgcgctgatcccctctctgaaagcgaaaaaaatcgatgccatcatcgcatccttgtccattactgagaaacgacagaaagaaattgccttcactgacaaactctacgcggcgaactctcgcctgattgcccagaaaggctcgaccattcaacccacgctggaatctctgaaaggcaagcgcattggggtattgcaaggttcaacccaggaagcgtttgccaatgctttatggcagcccaaaggggtagatgtggtggcttatcagaatcaggatctgatttatgccgatctggcttctggtcgtatcgacgcggccttccaggatgaagtggcagctagcgaaggcttcctgaagcaaaaaggcggcaaagattatgcctttgccggtccttcggtaaaagatgacaaattcttcggcgtgggtactggtatgggcttacgtaaagatgataccgaactgaaagcggcgctggataaagcctttgccgaaatgcgcaaagacggcacttacgacaagctggcgaagaaatacttcgattttaacgtttacgactagttttaccgacaggttgctcagcctctgccgcaatggcagaggcaatttctgacaaccaaccagacccacactcagtgatagcaggaaaaaccgatgctggatggatattccaaactgatatttgatggtgcgctggtgacgctggaattagcgttgtgctcggtgctgctggccttggtgataggcatggtgggcgctggggggaaattatccgctaatcgcttgttgtccggcgtatttgagtgttacaccaccctgattcgcggggtgcctgatttggtcttaatgctgctcatcttttacggtttgcagatcatcttaaattccatcactgaatctctgggattcagtcagatcgatattgatccattatctgccggtattatcacgttgggttttatttacggcgcgtattttaccgaaaccttccgcggtgcctatatggccgttccccgtgggcaaatcgaggcggcgactgctttcggtttttcccacagcaagatattccgtaggattatgtttcccgccatgatgcgctacgccttgcccggcattggtaataactggcaggtgatcctaaaagcaacggccttggtctccattctgggtttaaacgatgtggttaaagccacgcaactggcgggtaaagggacttacgagccgttcttctttgctatggtggccggtgcggtttatctgatcttcaccacgttatccaatggtgtgctgtggtggctggaacgccgttattctcaaggtgtgaagagggctgagctatgatggatattctgcatcaatactggcagtcactgctttggagcgatggctaccgttttaccggcgtggcgataacgctgtggctgctgatttcttcggtggtgatgggcgggctgctggcgattccgctggctgtagcgcgggtttcaccaaatcgcgcgattagcctgccggtatggttcttcacctatatctttcgcggtacgcctctctacgtacagcttttggtgttttactccggtatgtacagcctagaaattgtgcgcggcagcgagtttttaaacgcctttttccgcagcgggctgaattgcaccattctggcgctgacgctgaatacctgtgcctacaccacggaaatctttgccggagccatccgggcggtgccgcagggggaaattgaagcggcgaatgcctatggtttttcccgatttaagctctaccgctgcattattttaccttcggcgctgcgtatcgccttaccggcttacagtaacgaagtcattttgatgctgcactccacggcgctggcttttaccgccaccgtaccggatatcctgaaaatcgcgcgggatatcaacgccgcgacctatcaacctttttacgcttttggcatcgcggcggcgctgtatctgataatttcatttggtttgatcagcctgtttcgtcaggcggaaaagcgttggttggcacatattaagccgcagtcgacgcattaaaggtttatcccgtcggggctacgggatggggcattttaaatcagggatgcgcaggctccccgctggcgccaagtacggagagaatgatgataacaacatccgaaaccaaattagccgtgatcgagctgcataagcactatggcgagcatgaagtattaaaaggcgtatcgctatcggcgaaagccggtgacgtgatttccattattggatcatcaggatcggggaaaagcacctttttacgctgtatcaactttctggaaaaacccagtgaaggttcgattagcgtgaataatcaagacataaagttagttcgtgataaagacgggcaactgaaagtattcgataaaaaacagctgcaactgttgcgtacccgcctgacgatggtattccagcattttaatctgtggagccatatgacggtgctggagaacgttatggaagcgccaattcaggtgctcggcctgagcaaatcggtggcgaaggagagagcgattcgctatctggataaggttggcattgatgaacgggcgcggcaaaagtatccggttcatctgtctggcggccagcagcagcgggtttccattgcgcgggcgctggcgatggagccggatgttttgctatttgacgaaccgacttcggcgctggatcctgagttagtaggagaagtgctgcgaattatgcaaaaactggcggaagaagggaaaaccatggtggtcgtgactcatgaaatggagtttgcccgccacgtttccaaccatgtgatatttctgcataaaggtgttattgaggaagaagggccaccggccgaattgttcggtaatccgcaaagtgcgcgcctgaaacagtttctttcaggcgcattgaaataatcaaaaaaatggataattagaggtgcggacgaggaagcggcttttgcagcacatctcgcagcgcctcttccaaatcaaaataacggaaaccgaaaccagcctcttctatacgtttcggcaatgctctttggctgcctaacaccaataccgcggattctcccatcagtagccggataacggtggcagggacgcgcataaaggccgggcgattcaatacgtcccccagcgtggcgctgaactgctcattatgtaccggataaggcgcaaccatattgaacgggccgtgcagctcgtcgctggttagcaggtaatgaatgccattgaccatatcatccagatgaatccatggcagatattggcgtccatctccgataggtccgcccaagcccagccggaaaatcggcaacatttttgccagggcacctccgtcggcagccagcactacgccggtacgcaacaaacacacgcgcgtctgcgggctttctgccgccaacgccagattttcccaacgttggcaaagctgatgggtaaattcatcatgaggagtttcttcctcagtgacaaaagagtcgccctgatcgccgtaaaaacccacggcagagccagaaattagcactttaggcggttgctgaccggctttaatcagattggcgatacgctcggttatttgccagcggctttggcacagacgttctttttgctgcgccgtccagtgcttatctgcaataggttcaccggcgaggttaattaccgcatcaaagtcatcgaggttctgtcggtcatctagcgtagaccagcaggtaacctgttgacctaacacccgtttagcgcgctcgggatcgcggctcagcacggtcacggtgtgcgagaggcttagcagtcgctgggtcaggctgcggccgatcagccctgttgcgccggttatcaagatacgcatggtaaacctccgtttatctctggcccagtttcaccctcggcgcagttcctgatgatctaatcatcacatcagtttgtctgcggaaaatctgagtaaaaagtctttttcgcgctcttttagcataggcgatccggggcatttatcccacgatagagagcacatcctgagtgaattatttctaacaggctgcggcgataaatggccagtaaccaaatgatatttcgattaataaaccgcgaagaaacggataaaacgaggcattccagagaaaatcactggattgctcaaaatattcgattaatgacttatctctttactttcgctgccgataacactttataggtattggcgaatgagtatgagcgagaaagcgatgagctgccagcgcggtgaaatagcaagcctgagttcgaaatagagcaggcaacgcggtctgcgaagtcatcagcttgccggtgtctgtgtaggggattttctgatatgaggtataaatgccccactgcggggcattgatggcaacttagctggctttggctagctcataggcgcgtagcgttgccgggcggctggcaatgctctggaaccagcgttcgacggcgggatagtcggccaaatcgatattctgatttttatgggaaacaacccaaggataagtggcgatatcggcaatactgtaattttcaccggccaggtaggcgtgtttttgcagttgggtatctaacacaccgtacaagcgctgggtttctttctgatagcgttcaatggcgtaaggtattttttcggaagcataaatgctgaagtgatgattttggccgagcatagggccaaaaccgccgacctgccagaacagccattgcaaggttgccgtgtgttcacgtagctcagcgcttagaaatttaccactcttttcagccagatacagcaagattgcgccggattcaaaaatactgatgggatcgccgccgccgtctggacgatgatcgacaattgccgggatcttattattcggtgatatagcgagaaaatccggtttgaactgatcgccggcgctaatatttatccggtgaagattataaggtagtccagcttcctctaaaaacagggtgatcttgtgtccgttaggggttggggcgtaatagagatcgatcataacattctccaaagcgacatcagacagggggaaataacgacttcatttgttttttaacaccaaaacaggctcaggcacatggaaacaaggtaacaaactgagagtgaataagtgaagataaattgatctacgtattgtccacaaatctacagtaaataagagaattcagtgtgactttgataggttacctgaatcaaaatcacttcaacgctggggcacaatttagccataaatatgacgagtccccttatttatacttgcttgcaggatttctgctagagtggaaacactgtgtcgagggagcttaagtacacatgaaactcaatattgagattaactgctcttatgtatgtgagccgatatacaggaaggatggcagcctactcgctgctgaattgctcagccgttttacgacaaaacctttggatttaccgattaatccggaagatttttttaacgagttagacagcgaggggaaaggaaaactgttccgcgatcagctgttggcagcgcagaagtatagccagtggtttatcgataatcaggtactgctttccatcaatattgattttgatacggcaggaattattgtcagagacagcgaattgcaggcgttactaaataccatgccgtttttgcgtctggaattaatggagactttctccaatttatccgatggtaacaacaatccgttgctgcgagacttggttaaactctatccactatggttagacgatcttggacgcggagattccagtctgaacgcggtgacggccaatatcttcgaatatgtcaaaattgataagcactttttctggcagcataataagcacaccttcccaattctgattaataacgtcaaaaaatactgcgaaggcgttatcgttgttggcgtagaaaatcagatcgaatccgagcaattgcagggcagtaatattgatgccatgcagggttatttatttaactctctgactttggatgaactgacccaaacaccccgctaacaggtcgttaagttatgcggttaactttcctgcaccaactgacgattttctctacgataataccggtattgcacaaatgaaggcgctgttttactcaatgcgctggtaataagtcgtttattctcggaataatctcaattattgaatgttaaactaggccgtatttattaatgagggctgagacggcgataacctgccagacgccgttgctgatgatcaaaaataaggtgatgccatgaagttaatgtttgcttctgatctacatggttcgcttactgcaaccgataaagtattggaaatttttaaccgtagcggtgcgcagtggctggttttgttaggtgatttgctcaaccacgggccgcgtaatgctttgccggaaggctatcagccggcgcaggttgccgagcaacttaacgcttacgctgatcggattattgccgtgcggggaaactgtgacagtgaagtggatcagatgttgctcaactttccgatgatggcaccctggcagcagattattttaccggaaagacggttgtttttaacccacggtcacctttatcatcctgcggaacgtcctccattgcgttgcggggatgtcttggtttatggtcatacacatctgccgcaggctcagctacagggtgatgttttttgtttcaatcccggctcggtcagtattcctaaaggcggtaatccagcgagctacggcatgttggatcaaggtgagttgcaggttttgaccctacaagatgataaacctcttgcccggttggttttaaccgatgagttttaaacgccgagggttatcgtcggttaaaaatacgcgttttacacatacttataatgttgtttttgaaaaacacttgatcaacaaatgcgcgcttatcgtcgcgcccagatagaaggtttcagaggatggtggagcaaaatccaacagtgagcacggaatgggttgatattgttgatgagcaaaatgaagtgattgctcagtccagtcgtcaacaaatgcgtgctcaacgtctgcgccatcgtgctacctatattgtggtgcatgatggtatggggaaaattctggtacagcgtcgtactgaaagtaaagacttctacccgggtaaactcgatgcaacggcggggggagtggtgcaaagcggtgaaaacttcctcgaatccgcccgtcgtgaagcggaagaagaattgggtattgccggcgtgccttttgccgagcacggcctgttctattttgaagaggagtgctgtcgcgtgtggggcgcattatttagctgtgtttctcacgggccttttgcgctgcaagcggaagaaattgatgaagtgcgttggatgttgccggaagaaatcaccgctcgttgtgatgaattcactccggattctctgaaagcgctatctttgtggctgagccgcaataacgaacaggattacggtaagattaccgttcgggaagattaacttcgccgataatctcgcggttatcaataagtgttgctggcaatgaataacaaaaggctccgaataatcggagcctttttcatatcgaatatgagtaaaatcttagcgaacgataatacccaatagaatgcccagcgcgccgaagtcagcgtcgctgaaggtcgtattggcaaaaccaatatcacccagcactggcagtaggaataccggcaagaaggtaatcagcaggccctgggcgaaagcccccagaatcgccccgcgacgaccaccggtcgcgttgccgaacacgcccgcagcggcacctacgaagaagtgtggaacgacgcctgggataatcaccgtcatattcagtaggtacagggcaaacataccaatcaaaccggcggcgaagctgctcagaaagccgaccaataccgcattgggtgcgtaagggaatacgactgggcaatccagcgcaggtttggcgttaggtaccagtttgtctgaaatgcctttaaatgccggtacaatttctgcaatcaccatgcgtacaccttgcagaatgatataaacacccgctgcgaaggtaatggactgcatgatagagaacataaaccagtttttgccgccgctcagttctttcaccacatcggccccggcaaacaggcaggttaccaggaagataatgctcatggtgaaagagatggcaactggcgtatcccgcaggaacagcaggcttttcggcacgttcatgtcttcggtcgaatgttctttattaccgaatttgctgccgataaaaccggccagcacataagataacgtcgagaaatggccaatagccacgtcatcggaaccggttacttttttcatgtacggatgagcaatcgcagggaagaacaccattgccacgccgacgaccaatgaaccaacggctatcagcgtaataccgctcatgcccgccgttgccagaatcactgccaccatcattgacataaacagcgtgtgatgaccggtcaggaagataaatttccatggggtgaaacgggcgatcagaatattgatcaccatagcgaagaacatgatcatcgccatttctttaccgaagcttttttgcgccacggagacaatggcttcgttgttcggtacgacgccctgaataccaaaggcgtgctggaaaatgttagcgaaatcacccagagaggaaaccaccagaccggcaccggcacccaaaatcacaaaacccatgatggttttgacagtgcctttaatacattcggttacgggttttttctgagcgattaggccgattaaggcgataaaaccgactaataccgccggttcggacaacacatcgctcatcagaaaacgaaagaaatccatattgacctccgcttacagcgcgcctaattcggttaatgcaacggacaaacgctctttcatggcttttttatcgatcatgttatccagtgcgacaattttgcccgtcacggattgcgcgatcagctgttcggcgatgtctttggtgccaacataaatatcgctcggtgtgcctttggctgagcctaaatccacatgatcgacttcagcgctgacggccagctctttcagaatgtttttaatactgatttccatcatcaggctggtgcctaaaccgttaccgcaaaccactgtgattttcattttatttccccttggaattggtgatcccgattgcttcggtggttaaaccttcgctaatcgcggattaatagcgcgcaatgacagataaaatgtcttgcgtcgttttggcgtttaacaggctgcttacgtcattatcgttatcgaacaattgagcgagttgagagatagcctcaatgtggctattgctgtccgtcgcggctaatactattaataattttaccgggtcgttctcttcggcatcgaaattgacgccggaggaaatgaccgtgagcgccagtgaaagcttattgacgccttcttctgggcgagcatggggcatggcgataccggggccaacaacgtagtaaggccctattgcctcgtgagagcgataaatggcatcgacgtagcgtggttcaacggagccattatcaatcaatggctgacatgagatggcgatagcatctcgccaatctttggcctgttctactacctgaacgacattcgccgttaacaatgtctttaacatgagatgagtcactcccgataacaattcacatgagagtagatatttcgctcattgattaatgtgatgtttatcgcatttgatagcgctacctgatagcgctatcaataattgtgatagcgctatcatttaaccgatcctggtctttggctaaatctgccccaggcatatacaatgcgactcgatatctgcgctgctaatagtaggcggagcgcaacagacaggctgaaaacggtgagtttcagcggacagggaacccagaatggaaaaaacgcgtaagcgccgtaacaccgggagagtcacgctgcaagaggtggccaactacgccggtgtcggaaccatgaccgtttctcgtgcattgagaaccccggagcaggtttctgacaagttacgggaaaagatagaacaggcagttgaagagcttggctatatccctaatcgggcagcaggtgcgctggcgtctgggcatagcaataccgtagcggtgctgattccatcgctgacagataagtcaagctcgcgctttatgcaggctttacagcaggtgctgaataaaaacgaatttcagctgttactaggctgtcacgaacacaatcagcacaaagaagccgaaattttaatgaccttattgcagagtaatccggctgcgctggttatttttggttctcagctggcagagaaaacctatcaaattcttgagcgagcaaatattcctacagtgaatgttgttggctcgcgttacagcaaggctgaaatcacgctggaggcggcgttttttgaagccgcgcataaactgacggatcatttgctggatcaaggttatcagcatattggttacgtgggcgcgcatatggataaccgcttgcaacggcaattgctcaatggttggcataaagccatgctgagccgctaccagaattcagatcagattgtgacgactccggaagccgccagcctgcaatttggccgctatgcgctaacggaaatgctgttgcgtcagcctgagctggatgcggtgatttgtagccatgaagatattgcgttgggcatcatgtttgaatgtcagcggcgtttgctgaagatccccggtgatatagccgtggcttgtctggatggctcagacagttgtgaccaaacgcatcctaccctgacgtctattcgtattgattacaaaaaaatggggcgggaggccgggaaactactcattgatatgctcaatgatagtgatgatgacgaagaacctcggacgcagaccttcagttaccagttagagttgagacaaagcagttaaggcagttaaggataggcgggcagatttcaccgtttaaaccataaaaaacgccagcgctaaggctggcgtttatcattcaaaccgaagcgtaaattaagacgcgtcggcctgagcagactgaatagcagtcagagcgacggtgtaaacgatatcgtctaccagtgcgccacgggacaaatcgttaaccggcttgcgcataccttgcagcattggcccgatagagaccagatctgctgaacgctgtaccgctttgtaggtggtgttaccggtgttcagatctgggaagatgaacacggtagcctgacctgcaaccggagagttaggcgctttggatttcgctacgtcagccatgattgccgcatcgtactgcaacggaccatcgatgatcagatctgggcgtttttcctgtgccagacgggtcgcttcacgcactttctcaacgtcactacctgcgccggaattaccggttgagtaggaaatcatcgcaacgcgtggttcgataccgaaagcggccgccgaatcagcagattgaattgcgatttcagacagctgctctgcggttggatccgggttgattgcgcagtcaccgtaaaccagaacctggtcaggcagcagcataaagaacacggaagaaaccagcgagctgcccggtgcagttttgatcaactgtagcggtggacgaatagtgttcgcagtggtgtgaaccgcaccggaaaccagaccgtcaacttcgccttgttccagcatcagcgtacccagaaccacgttgtcttccaactgttcgcgggcaacgacttcggtcatgcctttgctcttacgcagttctactaaacgtggaacataacgttcgcgtacggcaaccggatcaacaatctcgatacctttacccagttcaacgccttgagcggcagccactcgacgtatttcgtccgggttacctaacagcacgcactcggcaatgccgcgttcagcacagattgcagccgcttttacggtgcgtggctcgtcgccttcaggcagaacgatgcgtttgccggctttacgtgccagttcggtcagctcgtaacggaatgccggtggagacagacggcgtgaacgctcggaggtggcgctcagtgagtcgatccactcgctgttgatatggctggcaacgtagttttgcagcttttcaacgcgctcatggtcgtccgcaggcacttccaaattgaagctttgcaggctcagagaggtctgccaggtgttagtgtcaaccataaatactggcaggccagtctggaaggcacgttcacacagctgtttgattggctcgtcgatagcgtagccaccggtcagcagaattgcgccgatttcaacaccattcatcgccgccagacaggctgaaactaatacgtctgggcggtctgcggaggtgaccagcagagaacccggacggaaatgctccagcatgtgaggaatgctgcgcgcacagaaagtcacggatttaacgcggcgggtattgatgtcgccttcgttgataatacgtgcgttcaggtgtttgcacatgtcgattgcgcgggtagcaatcagctcgaagctccatggcacgcagcccagaactggcagcgggctgttggcaaacagctgagtcggatcgactttcgctacgctggccttggtggaatcatcaaagatttcagacaggtcagggcgagtacggccttgttcatcaaccggggcattcagtttgttaatgataacgccggtgatgtttttgtttttgctgccgccgaagctggaacgagccagttcgatacgctctttcagctgatctggagaatcgttacccagcgccagcacgaacacgatttctgcgttcagcgttttagcaatttcatagttcagcgcgttggcaaactggtgtttgcgggttggcaccaaaccttcaaccagaaccacttcggcatctttggtattttcgtggtaacgcgccacgatttcttccatcaacacgtcctgctggttagaactcagcagagtttccacgtagttcatattcagcggctcggcagcggtgatgctggagttggcgcgaatgatagtggtggtctggtcaggcgcatcgccaccggaacgcggctgggcgataggtttgaacacgcttaagcggacgcctttttgctccatggagcgaatgacacccaggctgacgctggtcagacccacgctggtgccagttgggatcaacataattgtacgggacacggctaaacctctttacggttgcactcaggcgacggttctcgcctgctgtcgggcgaaaacaacaccgccagccttggctgacggtgttgaggagacttatgcagtcagacgggctgcgtcttgtgcgataacaaactcttcgttagttgggattaccatcgccagacggctgccatctttagtgatggtgccggatttaccgaagcgagcggccaggttacgttcgtggtcaatttcgaagcccagcagacccagtttatccagagtcagttcacgtaccatagctgcgttttcaccgataccgccggtgaagataaccgcgtccaaacggccgtccatcagtgcagtgtaagcaccgatgtatttggccaggcggtggcagaatacgtccatcgcgcgcttagcgtcagctttggtgtcgtagttgtcttcaacgtaacggcagtcgctggtgacttcggtcagacccatcaggccagactctttggtcagcattttgttgatttgatcaacgctcatgcccattgcatcatgcagatggaagatgattgctggatcgatgtcaccgctgcgagtccccatgaccagaccttccagcggggtcagacccatagaggtatcgacacatttaccgttgcgaactgcggtaacagaaccgccgttgcccaggtggcaagtgatcacgttcagttcttccattggcttgttcagagccttggccgcttcctggctaacgaagaaatggctagtaccgtgtgcgccatagcgacggatgccgtgatctttgtacaggctgtacggcagggcgtacaggtaagattcttctggcatggtctgatggaatgcagtgtcgaataccgcgacatttttattagccagattcgggaaggatttcaacgcctcagcgataccgatcaggtgcgctgggttatgcagtggtgcaaacgggatcgaatctttgataccctgaataacttcatcgtcaataattactgatgaagtgaatttctcaccgccgtgaacgatacggtggccgacagcagtcaactgggcagaaagctctggtttttgtgccagaatagtattaacaatgaaattcagtgcttcgctgtgcgctgcaccagcacccaatgctgcttcttgtttgccgccatccattttccatttgatgcgggcttctggaagatggaagcattcggctaaaccagacaggtgttcttcaccgttggtcgcgttgatcacggcgaatttcagggaagaactaccgcagttaagaaccagtactagcttactcgacatggaagtacctatttattgtcgtgtttgcaataaacacgtggttaataaaacgtcaatctgaccacaagcgtagcgcataatggtgatgacattaatgattaacatcatgcgataaatgaaaaaggcatgatggtggaaaaatcgctgatcaagtgtttaaaacctggtggttaaaatgcatcaacgatttaacaaaaatgattaatttgctgctaaaagttgacatattgtgcgtcttcttctagcggccaaaaggccgggctaggataccgatagcgcgcgctaaaaacaaaatatatttaatccatccaatttatcattggtgggttgcaagaaaattttaaattttgtctttgaagttgaggtgagccatgacatccaaaccttccgattccgttagctggtttcaggtcctccagcgcgggcagcactatatgaaaacctggccatcagacaaacgtctggcgccggtgttcccagaaaatcgcgtagtgaatgcgacgcgcttcggtattcgctttatgccgccgctggcgattttcacgctgacctggcaaatcgcgctgggtgggcagcttggccctgcgattgctaccgcactgtttgcctgtggtttgccgctgcaaggtttgtggtggctgggcaagcgctctattacgccgttgccgccgactttgttgcaatggtttcacgaagtgcgcaataaactggctgacgccgggcaggcggttgcgcctatagagaaaactccgacctatcagtcgctggctgaattgctgaaacgggcgtttaaacagttggataaaacttttctcgatgatttataacttttgcaacgataactaaatacaaatccgagagtcggcagcggctctcggtgaatcctttcaccaaaccccctgtcaaatcaaagaatggcccgctagtagtaccactgaaagatgcgctatgcgatgatttcaccattaacttgcctttcaggagatcatgatggatatgactaacgcccaacggctgatcctttcaaaccaatacaaaatgatgaccatgttagatccggataacgccgagcgttatcgtcgtcagcaaaccattgtcgagcgcggctttggtctgcaaatgcgcgagttggaccgtgattttggtgagttaagcgaagagacctgccgcaccattattaatattatggagatgcaccacgcgctacaggtgtcttgggacaatctgaaagataagcaagatctggacgggcgccgcatcgctttcctcggtttcgatgctgccaccgaatcccgctacctgagctacgtgcgctttatggtgaataccgaagggcgttatacccatttcgattccggcactcacggtttcaatgcccaaaccccaatgtgggataaatatcagcgcatgctgtctatctggcagtcttgcccgcgtcaatatcatttgagcgcggttgagatttcgcaaatcattaatgcctgattaatcacccgcaaagccgcgactgatcgagcgagacgagggggaataggccattggctcggtggaggtttgtccattacggtgcccataggtatattaccccctcgttgacccggctctgtggccgggcttgccgttaaactcaataaatagcctgatgatttaggtttcaagaggatgtgcttgtggagtgcaaaggttttctttttgacttggatggaacgctagtagattcattgcccgccgtggagcgagcatggattggctggggagccaggcacggtatcgaatcatcggtggtattggactttatccacgggaaacaggctattacctccttgcgccactttatgccggggcagagtgatgaggctattcaggccgagtttctgacgttggaaaaaatcgagtcggaagataccgaaggcgtcaccgcattgccgggtgcagttgcgttactggagcgtctgaatcaattggacattccttgggcgattgttacctcgggttccgtgcccgttgcgtccgcccgtcgcgcagccgctcatttaccgttaccggaagtgtttatcacggctgaactggttactcacggcaaaccgcagcccgatgcctatctgctgggcgcgcagcgtctggggctgaaaccggaagattgcgtggtggtggaagacgcgcccgcggggattctttccggtctggccgcaggttgtaaagtgattgcggttaacgcaccagcggacacgccaaaacgggatcaggttgatttgattctgacctcccttgagcaaatcgcgatagagaaaacgctcaacggcgcggtgattcagcgggttaagtagctttcctgcttattcattgaatctgcgataaaaaccaagagcgccttaaggcgctctttttacgtttaccgagtcccagctgcgacttaaccggctggaagggaaaaactggccgccagactctccagattttgcggtatcaccttaatcacgccgccgcgcggactatctatatcggcaatcaacataaacgagaaagagataaccagcggtaatatcaacaacatgatttttcgccctttgccgtttttaaaaccgtagcccaccaacgtgcagcagcagattgcaataatactcatcaacatccatgccgccggaggaatacggttccaccaagccgcttgagtgtaactggctgagttcaatacatcgttcattccagccagtaccagcgccatcggtggcgttggctgttgcgccgcaggttcaagcagcacagtccagagttcatcctgtagctgattggattgctggttaatttccagcagcctggctttatcgcgggtgcgataaaacagaattcgttgatctacgtagcgtatcagcaggtctttggttttatctcgcgcggcgggcgagagcaggtcggcacgcagatattcagtgctaatagcgttggcttccgcttcttcttgatttttacgtaaatcgtaacggctgatagccatggaaaaactgaagccgataatcagcccgagtagcgtcagtgtcgcaccttgaataacggtgaagttttcctgagtgttgccatccatggtctgtccgcgacgaaaaaacgcctggccgataagggcgcagccccacagcaccagaaaagtcaggagaaacagaaccagcggataattagtgatattaagcatttagcgaccttgctcttagggataatttcagcggtaactgtcacgcggctgttatacggccgcgtttacggagtcacccaaatcaggcgggttgccaccaatctagtatagtcagatgttgcccaaaccaccgatatgctcaccattaatatggatatgtatcactaacgaacaaacgactcatttccggcgaataatcagcaaatcggcaatgaattggataaaaatacgccataaaaacggtataagactgataagcgacaattttttaatcaatattgatcgcaggcagttgaactcgcggcgtttaatgctttactgataacgcccaatctttgatttccgatttgccagcgaggccattttgaatagcgaactattgtgggtattaactttacttctgatagcgataggactgtttaccactaataaattgagaatggacgtggtggcgctgttggtgattattgcctttgtgatgagcggcacgctgacgctggcggaggccaccagtggttttagcgatcccaacgtgattttgattgccgcacttttcgtgattggcgaaggtttggtaagaaccggcgtggcttatcaggtgggggattggttggttaaggtggcagggcatagcgaaaccaaaatgctggctttgctgatggttaccgtagccggattgggtgcctttatgagttccaccggcgtagtggctatttttattccggtggtgctaagcgttgccagccgaatgaaaacatcacccagtcgtttaatgatgcccctgagctttgccggattaatcagcggcatgatgacgctggtggcgacgccgcccaatatggtggtgaacagtgaactgctgcgagaaggcattcagggtttcgggtttttcggcgtcacgccaattggccttattattctgctgttgggcgtaggctatatgctgattgcccgccgctggctaggcagcaacgaaccgcgctcagataaggaaaagtggcaacgccgaactttccgcgatttaattcgggattatcgactcactggccgcgcgcgtcgtctggcaattcgtcaacgttccccactgatagggcatacgctggacgaactgcatttacgcgctcgctatggcgctaatgtggttgggattgagcgctggcggcgttttcgccgggtgatggtcagcgcaaccggtaactccgaactacgagaaggggacgtattgttgatcgatatgtccgattgtgacgtggatttacgcgaattctgtagcgatcaattgctggaaccgatggtgctgcggggggaatatttctctgagcaggcgcgaaacgtcggtatggccgaggtttctctgattcctgactccactttgatcgggaaaagcctacgggacatgacattccgcagtcgttatggcctgaacgtggtgggaattcgccgtcacggtaaagcgatggaaggaaagctggtggatgaaaaactccagttcggcgatattttgctggtgattggcgactggaaactgattcgccagcttcagtctcaaaccaaagattttatcgtactcagtttaccggcagaagtggacgaagtggctccggctttgtcacaggctcctcacgcgctgttttgtctggcgttgatggtcgcgatgatgctgaccgacgaggtgcctaacgtgattgccgcgttgatcgcttgcctgcttatgggacgttttcgttgtattgatatggacagcgcttatcgcgcgattcattggccaagtttgattctgattattgggatgatgccctttgcgctggcgctacagaaaaccggtggggtagaccttattgttcacggcctgatggatgtcgcgggcggcgcggggcctcgagtaatgctgctgtgtctgttcgtgctttgcgccacgattgggttgtttatctctaatacggccacggcggtattgatggcgcccattgccatcgcggcagcgagagaaatgtcggtatcaccactcccattcgccatgattatcggtattgccgcttccgctgcctttatgacaccggtttcatcgccggtcaatactttggtattaggccctggtggttataaatttggcgattttgtacgtatgggcgtgccgtttacgctgttggtgatggccgttagcgtgatggttgtgccgctattatttccattctgattagctttcgtccttggtgccaagagaggttggtggcactgacgtgagccagctcattaggatgggttcacgtcagcgacggatcgggattattccaagggatctaggctgatttcatccaaagacaggctgaagctaggcacgaagacttccataaagtaatccatttccgggcttttacgcaggtcgagagttttctccaatcgcgtttttgcttgggtaaactcgtgatttcccgccgaaagctcttccagacatttcagataggcgcacagggcatcagcctgtttaaccagcagtttctcatcttcactgtaatagttttcatccagcaagcagcggaaatcatgctgtaattcggtgggtaacatttcgatcagtttctgctgtgccactttttcgatttttttatattcgtgggcaatctgcggattgtaatacttgataggcgtgggcatatcgccggtaattacttcgctggcgtcgtggtacatggctaacagcgcgatgcggtcggcgttcagattaccgttgaatttacggtttttgatgattgccagcgcatgagcgacaaaggccacttgcaggctatgttctgatacattttccgttcgaacattacgcatcagcggccagcgattaatcagtttcaggcgggatagatgggcgaagaagtggctctgactcataattttctctctttgttttttctacgacgataaatcggtaatcaaacagggagtcggggtaattttaggtttatagcctaacagaagaggaggcgggttttgtaatttctcatctgcgatagcgatgatgtgaccagataacctgggttgggttttgaaagcctgacggttcagttgctccccactcgcggagacggcgataaaatgtctcgagctatgccgtagctttctgataattcgtatcggatcaggtttgaaagccttattgttcggtttttccctcactcgtcgtggaggcttgcgagcagggttgacagtcgccccagctctgtacttggtgcgaaagtggggttctgcgaattttcctcgtacacttttcgtccggcgagccagcgctagattcagctgcgggcgttatcaggatgccatgcttcctgcctctgcggctcaaggcgcgctttgaacagctgccggcccacctcctgattgcgccttattaaaatcaaaaccatttttatgaatcgctatttgcctttcacccttgatagggtttttggccccaagctggccctttcacagcacatgtgatctgcctaatgaagagcgagttgcggcattccgccagccgaagcgatgagcaagagaaccgacgccgtgagaaggcgataggtacggaggtgcggagtgttaagacgtggggaatgggggggcgcgtagtccccccaaatcaattactgatggtatgtctctaggaaccggcctagcttcccgaccgccatttctaactcatctacgcgcggtaaggtcacgatgcgcacgtgatcagggtacggccagttgaaggcactgccttgtaccagtaacactttttcttgcaacagcaaatccagcactagcttctgatcgtctttcagattgaaacgcttggcgtcgatacgcgggaacatatacagcgcaccgcgaggcttcacacaggaaaccccagggatctgattgatcaattcccaggcgcgatcccgctgttcatacaaacgaccgccgggctgaataaactcactgatgctctgataacctcccagagctgtctgaatggcgtgctgcatcggcacgttggcacataaacgcatcgaagccagcatttctaggccttcaatataacctttagcgtgcttcttcggcccgttaagcaccatccagccctgacggaaaccggctacgcggtaagtcttggacaaaccgttaaaggtcacggtcagcaaatccggtgctaatgcagcaatcgaatggtgctgcgcatcgtcatacaaaattttgtcatagatttcatcggcaaaaatgatcaaatcattctggcgggcaatctcaacaatctccagcaacagctctttgctgtataccgcgccggttgggttgttcgggttgataatcacaatgccgcgagtgcgcggagtgattttgctacgaatatcatccagatcggggaaccagtcagattcctcatcacacatatagtgcacggctttaccgctggacagggaaacagccgcggtccacagcgggtaatccggcgccggtaccagcatttcgtcgccaatatttagcaaggcttgcatggattgcacaatcagctcggaaacgccgttgccgatgtaaatgtcctccaccgtcagatcgcgcatatcccgcgcctgatagtgctgcatgatggctttgcgcgctgagtataggcctttggagtcgcaatagccttgcgccgtgggcaggttacgaatgacgtctaccagaatttcatccggtgcgtcgaaaccaaacggggcaggattgccgatgttcagtttcagaaccttattaccttcttcttcaagacgcttagcttcttttagcaccgggccacgaatgtcgtaacagacgttgtccagtttgctggatttttcaatgggggacataaaacagagccttttcactggtaaaagcgtgtcctgttcctggaacacggcaaggtgttcaatgtactccgctgccgcacatttttgaagttctatacatcgctttactgcaaatgtttatcgagggtaactgacttatcatttttcctgtttcattcatcataaaaatcttaatgattagataaaatgaagtgtttgctgtctattttctgatcgaaatgacgtgtttcggcgataaagcaaccggtaacgcataatattcatccagcaatacttatcaacttaacgcgttcccttactatttttacaataaaatattggccaatttcttttatataataagttgatagctaaatattcatgtttttatcatacatattgtagatgccagtctaaaaatggcagggaagctaaaaactataaataggaaaactattaagaacatttaatgtaagggattcattctcgcactttagtagaaaatcattagttaaatctttttgaaaagataaaccaccatctcggtgataagttgtttttttatatataaaataagcggccattaaggtgaatttaattaaaaacagtacattagaagcattaaatttagcggcaagaaatggcgttccccagcataaaaaatcttcatttatcgaagatttagcggttttttgtgacgctattcatataattggatgactggttgggaaaagatgtttttgaaaaagagataaagataacgaaatataagttatttttttgccctactctaatgagtggggtactgtcatacttaacattgtctcatttgataatgttgttagttaaacaccagggtagtttgtaattagaattcaaaaaagtgaagaatacactatgacaaatgcaaatcgtccgataattaatctcgacctcgatctgcttagaacctttgtcgctgttgctgacctgaatactttcgccgccgctgctgccgcagtatgtcgaacgcaatcagccgttagccaacagatgcaacggttagaacagttggttggtaaagagttgtttgcccgccatgggcgcaacaagttacttactgaacatggtctccagttacttggctatgccagaaaaattttgcgttttaacgatgaagcttgcacttctttaatgtacagcaatgtagaaggcgtgctgaccattggtgcatctgatgataccgctgatacgctgctcccttttcttttgaatcgggtggcaacgttgtatccgcgtttagccatagatgtgcgggtcaagcgtgggccggaaattgctgagatgctgagcagtggtgaagttgatttagcgatcaccacggcagcagttgaaagtcttccccatctgatgttgagaacctccccaacgctgtggtattgctctgcggactatcagtttgtccctggagaggccattccgctggtggtgatgaatgagccaagtccatttcgtgacatggcaatagagcatctgacacaggctggtattccgtggcgcattgcctacgttgcttcttcgctttcggccattagggcggcggtgagggcagggttaggtgtgaccgccagacctatcgaaatgatgagtccggacctgcgggtattaggcgaaacagaaggattacctcggttgcctgaaacccattatgcgctgtgcaaagatgatgcatgtgaaaatgagttagcattggcgatttttagtgccttgcaaaatggttatcagccttcattgctgaccggaacagaaccatcccagggttccgaattgtatatcgataattaataagaattatttaacatctagtgtttcgttaatcccctgtttaaacaggggatttttcgtttctaagacagtaaaaacctatttattaccgttttgttgatatttcgtgactaaaggcgcgtttcccacacttattttggggtatagcccaagacagtcaggctgcagtctagactgatatccatatagctccccgcagtattttttttcttttcgttaacacgtcttcaattgactcaaaacgatgtttcactatttttagtttcaataacagctttttatttgttaagaaactgcctaataacactcaaaacgtgttctggatcaaaaaaatacccctagctagtgagtggaagaacaggttattcctgcgacaatggtatagtaaaaacgaaagatccacgttgctttatatgtgcatgatagaactcaacaaatgactgactcgatttagctttcgaggtcgcaccaaatgttaagcaagatcgtgcgtttgtaaattaatgtgtagttacttttgtcaaagttgacaaaaggttattgaaaggagtaaaaagcccacagtaaaacactggctaaatagttgtaaagacagtgtctttgtgtggttattatccttcccttgaatcgatgtggtgcacaactgccgacacaagagcagaacgttcgacgccacttttgatgagtaagcaatgagtatgtcaacaaccactgaagttatcgctcatcactgggcgttcgctgtattcctcattggcgctatcgggctgtgcggtttcatgctgctaggtgcgttcttcctgggtgggagagctcgggcccgtgccaaaaacgtaccctatgagtccggtatcgactcggttggctctgcgcgtatgcgcctgtcggccaagttctatctggtcgccatgttcttcgttattttcgacgttgaagccttgtacctgtatgcctggtcgatttccattcgcgaaagcggctggataggtttcatcgaagccaccattttcattttggtgctgctggctggtttggtttatctggtgcgcatcggtgctctggattggactcctgggcggtcgaaccgccgcgtgagcaaaccgagcacggtcacaaattccaaaggtattccgcccgatttgcgccaataaatacagcgaggcattaacatggactatacgctaacccgcatagaccccaacggtgaaaatgaccgttatcccctacaaacacaggaaaccatcagcggcgatccgctcgagcaagacatccatcgtagcgtgtacatgggtaaacttgagcacgcgatgcatgacatggtgaactggggacgtaaaaactcactttggccgtataacttcggtctttcttgctgttacgtagaaatggtgacctcgtttaccgctgtgcatgacgtggcgcgtttcggggctgaagtattgcgcgcctcaccgcgtcaggctgacttcatggtggttgcaggaacctgcttcaccaagatggctccggttattcagcgtttgtacgaacagatgcttgaaccgaaatgggttatctcaatgggtgcctgcgccaactccggcggcatgtatgacatttactccgtggtgcagggcgtagataaattcctgccggtggatgtgtatatcccaggttgcccaccgcgtcctgaagcttatatgcaagcgctgttactgttgcaggaatccattggtaaagaacgccgcccactttcctgggttgtcggcgatcagggcgtttatcgcgccaatatgcagccagaacgcgagcgtaaacacgctgagcgtattgcggtcactaacctgcgtactcctgacgagatttgattctgtcgatttgacagtcaatctaggtacgacagctaaattcgcggcgcactgaccacgaaatgaccccggtagtgatcaaaaaagttgtggtgaaaaaaaaattatgacagatcatacaacgaccgacagcgcccagcccgcatggcaaacccgcgatcatctcgatgatccggtaataggtgagttgtcgaaccgttttgggccagaggcctttgttgttcaggcgacccgtaccggcatgccggtagtctgggtgaagcgtgaacaattgctggaagtaatgtcgtttttaagaaaacagcctaagccttacgttatgctgttcgatctgcatggggtggatgagcggttgcgtactcaccgccaaggtttgcctgatgcggatttctctgttttctatcatttgctttctattgagcgtaaccgcgacattatgctgaaagtggcactgtctgaaaaagacatgcacgtgtccacagcaaccaagattttcccgaatgccaactggtatgagcgggaaacgtgggaaatgttcggtattacctttgatggccacccgcatttgacgcgcattatgatgccgcaaagctgggaaggtcatccgctgcgtaaagactaccctgctcgcgccacggaattcgatcccttcgtgctgaccaagcagaaagaagatatggagatggagtctctcaccttcaaaccagaagattggggtatgaagcgtggaaccgaaaatgaggacttcatgtttcttaacctcggtcctaaccatccgtcttctcatggtgctttccgcattgtattgcagctggatggcgaagaaattgtcgattgcgtgccagacgtgggttatcaccaccgcggcgcggaaaagatgggcgagcgtcaatcctggcatagctacattccttacactgaccgtatcgagtatctcggtggctgtgtaaacgaaatgccgtatgtgctggccgttgaaaaactggccgggattaaagtgccggagaaggttgataccatccgcgtgatgctgtctgaactgttccgcatcaacagccatctgctgtacatcagtacctttatccaggacgtgggtgcgatgaccccggtgttcttcgcctttaccgaccgtcagaaagtctacgatgtgattgaggcgattaccggcttccgtatgcatccagcctggttccgtattggtggcgtggctcacgatctgccacgcggctgggagcgtttgctgcgcgatttccttgactggatgcccaaacgtctggattcctacgtcaaagctgctttgcagaacagtatcctgaaaggacgttcaattggcgttgctgcatacaattccaaagaagcgttggattggggcgtcactggtgctggcctgcgtgccaccggtatcgattttgatgtgcgtaaatggcgcccgtattccggttatgaaaacttcgaattcgaagtgccaatcggtaataacggtgactgctatgaccgcgtaatgctgaaagtggaagaactgcgtcaaagcctgcgaattctggagcaatgttataaaaacatgccagaaggtccattcaaagctgaccatccgctgactacgccgccgccgaaagaacgtacgcttcaacatatcgaaacgctgattactcacttcctgcaagtttcgtggggcccggtgatgccagctaacgagtcattccagatgattgaagcgaccaaagggatcaacagttactatctgaccagtgacggcagcaccatgagctatcgcacccggatacgtaccccgagctatgcccatttgcagcagatcccatcggtaatccgtggcagcctggtatctgacctgatcgtctatctgggcagtatcgattttgtaatgtctgatgtggaccgctaattatgagtgatcaaaaagagacccaggatcataaagatcaacttgatgtggtgaacctggctgtcgatgcagcgcagtctactgccgttgagcgctctgtcgctgaacagccggccaccgcacaagaagcctttgaattgagcgcggaagaacgcgatgccatcgagcatgaaaagcatcattacgaagatgctcgtgccgcgtcgattgaagcgctgaaaatcgtacagaaaaaacgcggttgggtgccagacggtgcgattcacgctattgctgaggtgctgggtattccggcttccgacgttgaaggcgtagccactttctacagccagattttccgccagccagttggtcgccatgtgattcgttactgtgacagcgtggtttgccacattaccggttatcagggcattcaggcggctatcgagaaaaagctcagcatcaagccgggtcagaccacttttgatggtcgtttcacgctgctgccaacttgctgcttgggtaactgtgaccgtggtccgacgatgatgatcgacgacgatactcacagctacctgaagcctgaagaaattgaaaagttactggagcaatatccatgacaaatccttcaggttttactcgtgaaattatccgtaccccggaaatgcatccgctgacctggcgtttgcgtgatgacaaacagccggtatggcttgatgagtaccgcagcaaaaatggctatgtcggagcagaaaaagccttaaaaggcatggctccgccggacgtcgtcaatctggtcaaagatgcgggtctgaaagggcgcggcggcgcaggtttctccaccggtttaaagtggagcctgatgccgaaagacgaaagcatgaacatccgttacctgctgtgtaacgccgatgaaatggagccgggcacctataaagaccgtctgctgatggagcaattgcctcatctgctggtggaagggatgctgatcagcgccttcgcgctgaaagcctaccggggctacatcttcctgcgtggtgaatacatcgaagcggcggtgcatttgcgtcgcgctattgccgaagcgaccgaagccggtttgctgggcaaaaatattatgggcagcggtttcgatttcgagctgattgtccataccggtgccggtcgttatatctgcggggaagaaaccgcgctgattaactcactggaaggccgccgcgctaacccacgttccaagccgcctttccctgcgtcttccggcgtgtggggcaaaccgacctgcgtcaacaatgtggaaaccctgtgtaacgtgccggcaattttggagcacggcgtggattggtatcagggaatcaccgctggcaaaagtaacgatgcgggtaccaagctgatgggcttctctggtcgggtgaaaaatccgggcctatgggaactgccgtttggtatttctgctcgtgaaattttggaagattacgccggtggtatgcgtgacggtttgaaattcaaagcctggcaaccgggcggtgcgggtaccgacttcctgaccgccgatcatttggatctgcctatggatttcgaaaacatcggcaaagcgggcagtcgtttaggtacggcgttggcaatggcggtggatcacgaaatcggtatggtttcgctggtacgtaatctggaagagttctttgcccgtgagtcatgcggctggtgtactccgtgccgtgacggtctgccgtggagtgtcaaaattctgcgtgcgctggaacgtggcgaaggccaaccgggtgacatcgaaacgctggaacagctttgccgcttcttagggccgggtaaaaccttctgtgctcacgcgccgggcgcggttgaaccactacaaagcgcgattaaatatttccgggacgaatttgaagccgggatcgcgactaaggactatggcaatacccgagccatagccggtattcagcctaacctgttaaaagcgcgctggtagcactgatgcccttgctatctataaatcgttataagtagcaaacagttataagcagcaagggtcagaattttttgattaacgcttgtaaaaagaacggtttcaaggtcgtcgtgagcgacggtcaaacgaggcagaaatcagtaagaaagagcatttcgggctgatttttgacgaagtatcaccgagcgcaacagaccttgaatgtgttctgacgcaagccacttggaagcatgctgatatggctacgattcatgtagacggcaaagaatatgatgtaaacggggccgacaacctgttacaagcctgtctctccctgggactcgatattccttatttttgctggcatccggcgctgggaagcgtcggcgcttgccgccaatgtgcggtaaagcaataccaaaacgccgatgacacccgtgggcgtttggttatgtcctgtatgaccccggccaccgatggcacctttatttccatcgatgacggcgaagcaaagcagttccgcgaaagcgtggttgaatggttaatgactaaccatccacacgattgtccggtctgtgaagaaggcggtaactgtcacctgcaagatatgacggtgatgaccggccacagcttccgtaagtaccgtttcagtaaacgtactcatcagaatcaggatctcggcccgttcatttcccacgaaatgaaccgctgtatcgcctgttaccgctgtgtgcgttactacaaagactatgcagacggcactgatttcggcgtatatggcgcgcatgacaacgtatatttcggtcgtaccgaaagcggcaccttagaaagtgagttctccggtaatctggtagaagtttgcccgaccggcgtattcaccgataaaacccactccgagcgttataaccggaagtgggatatgcagtttgccccaagcatctgccagcagtgcagcgtcggttgtaacaccagcccaggcgagcgctatggcgaactgcgtcgtatcgaaaaccgctataacggcagcgtaaaccactactttatgtgtgaccgtggccgctttggttatggctacgtcaacctgaaagatcgtccgcgtcagccgcagcaacgccgtggcaacgattggatcgctctcaacgccgaacaggccatgcagggggcggcagatatcctgcgtcaggcgaagaaaaccatcggtatcggttcccctcgcgccagtctggaaagcaactttgcgctgcgtgaactggtgggggcagaaaactattacaccggcatcgccgcgggcgagcaacagcgtctgcaattgatgctgaaagtgctgactgagggcggcatccacactccggcgctgcgtgaaattgaaagctatgatgcggtactggttctgggtgaagatttgacccaaaccggcgcgcgcattgcgctgtctgtgcgtcaggctgtgaaaggcaaagcccgtgaaatggccgctgcgcaaaaagttgccgattggcaaatcgccgcgatcatgaacattggccagcatgccaaacatccgctgtttatcactaacgttgataacacccgtatggatgatatcgctgcctggaactaccgtgcgccagtggacgatcaggcacgtttgggctttgctattgcccacgcgctggacgagtccgcgccggcagtggaagacctgtcaaaagatctgaaaggtaaagtggatatcatcgtgcaggcattggccggcgcgagaaaaccgctgattattaccggtagcagcgcgggtagcgatgcaatcatcgaagcggcagccaacatcgccaaggcgctgaaaggccgaggatctgacgtaggcattaccttcgtcgcggcagcagctaatagcatggggctggcgatggtcggcggcggttcgctggatcaggcgttggctcagttagccagcggcgaagctgataccgcaatcgtgatggaaaacgatctttatcgtcatgcggcggcggatcaggttgacgcggcgttagccaaagcggaaaacctgatcgtgttggatcatcagcgcaccactattatggataaagccagtttgattctgtctgcggccagctttgctgaaagcgatggtacgctggtgaatcaggaaggtcgcgcgcagcgtttcttccaggtttacgatccaagctactacgacgaaaacgtggtgatgttggaaagctggcgttggctgcattctctacattcgacctacactagccgccacgtagactggactcagctggatcacgtgattcaggcctgtgtcaaagcattgccgcagttgcagggtatcgtggaagctgcgccagacgcgactttccgtatccgcggtcagaaactggcgcgttcaccgcaccgttacagtggccgtactgcgatgcgcgccaacatcagcgtgcacgaaccgcgtcaaccgcaagacatcgatacgccgtttgccttctcaatggaagggaacaacagtccattggccgatcgtcagcaaattccgtttgcctgggcgccaggttggaactcaccgcaggcgtggaataaattccaggctgaagtgggtggaaaactgcgctttggcgatccgggcgtgcgcctgatcgaagctggggagggcagcctggcttacttcaccggcgtaccggcagcctttgcggcaaataccgacggctggcgtgtggcaccttactaccatctgttcggtagcgaagaaatgtctcagcgttcagcggtgattcaacagcgtatgccagcgccttatgtgatggtcaatccatccgacgcagcgcaactgggggttaacctcggtatgttggtcgagttcaactgttctggtcagacgctgcgtctgccggtgcgtttgagtgaaactttggctcagggtcaggtcggcttgccgcttggcttaccgggcattccacctatattggtgggtacccgcgttgagaacctgcgggaggcggtgctatgagctggtttacccctgaattgatcgagatcctgatctccgtcctgaaagcggtagtgattctgttggtggttgtcacctgcggcgcgtttatgagcttcggcgagcgccgcctgctgggtctgttccagaaccgatacggaccaaaccgtgtcggttggggcggctcactgcagctggtggccgacatgatcaaaatgttcttcaaagaagactgggtaccgcgcttcgcagaccgggtaatttttactctggcaccggttatcgcctttacctcgttgctactgtctttcgctatcgtcccggtcagtccgacctgggcggttgcggacctcaacatcggcattctgtttttcctgatgatggccggtctggcggtgtacgcggtactgttcgccggctggtccagtaataacaaatattctctgttaggggcgatgcgtgcgtcagcacaaaccctgagctacgaagtgttcctcggcttatcgctgatgggcgtggtagcgcaggcaggctcgttcaatatgcaggatattgttaactctcaggaacacgtctggaacgttatcccgcagttctttggcttcgtgacctttgccattgcgggcgttgcggtttgtcaccgtcatccctttgaccaaccggaagcggaacaagagctggccgatggttaccacattgaatattccggtatgaagttcggtttgttcttcgttggcgaatacatcggtatcgtgaccgtctctgcactgatagtcaccttgttcttcggtggctggcaaggcccgttcctgccgccatttatctggtttgcgctgaaaacggctttcttcatggtgatgttcattctgatccgtgcatctttgccgcgcccacgttatgaccaagtgatgtcattcggctggaaaatttgcctgccgttgactctgctgaatctgctggcgactgccgcggtcattttgtacaacgctcaataaggggtgaatgaaccatgacgttgaaagagttagtggttggtttcggcacccaagtgcgcagcctgtggatgattggccttcatgccttccacaagcgtgaaacccaaatgtatccggaagagccggtttacctgccgccgcgctaccgtggccgtatcgtgctaacccgcgatccggacggcgaagagcgctgcgtagcctgtaatctgtgcgccgtggcttgcccggtgggctgtatctctctgcaaaaagctgagcagaaagatggtcgctggtatccggaattcttccgtatcaacttctcccgctgcattttctgcggcctgtgtgaagaagcttgcccaacgaccgctatccagctcacgccggatttcgaaatgggtgagtttaaacggcaggatttggtctacgaaaaagaagatttgttgatctcgggtccgggtaaatatccggaatataacttctaccggatggccggtatggcgattgacggcaagcagaaaggcgaagccgaaaatgaagccaaaccgatcgacgttaaaggtctgatgccttaaaggagccgttgatcatggaatttgcattttatatagcagcattggtagcggtagtggcgacaattcgcgtcattacccataccaacccggtacacgccttgttgtacctgattatctctctactggcgatttccgctgtgttcttctcactgggcgcgtatttcgccggtgcgttggagatcatcgtgtacgccggtgccattatggtgctgttcgtcttcgtggtgatgatgctgaacctgggcaacgtcgatgcgcaagaacgtgcttggctgaaaccgagcgtctggattggccccggtttgctggcgctggtgctgttatcggtactgatttatgccatcagcagcgtatccgatcagggtatcagcggcgagatggttgacgcaaaagccgtaggtatcagcctgtttggtccgtacgtattggcggttgagctggcttcaatgctgttgctggcgggtctggttgttgcgttccacattggccgggaacataaacccggtgatgtgctgagcagcggcgattcagcgaaaagaaaaacggaggaacaagcatgatccctctacaacatggccttattctggcggccattctgtttgtgctagggctgtctgggttgctgatacgccgcaacctactgtttatgttgatcagtttggaagtgatgatcaacgcggcggcgttggcctttgtggtcgcgggcagttattggggtcaggctgacggacaggtgatgtatatcctggcgattacgctggcagcggcggaggccagtattggcctggcattgctgcttcagctgtatcgtcgccgtcatactctggatattgatacagtcagtgagatgcgcggatgaacctattatatttaacaattctgctgccactgcttggttttctgctgttggcattctcccgcggtcgctggtcggaaaatacttccgccaccgtcggagtcggctccattggtctggctgcgctggttaccgcttacgttgcggttgatttcctcagccagaaagccacgggcgttcaggtgtttaaccaaaccctgtggaactggatgtccgttggcgacttcagtattccattgaccctgacgctggacggcctgtcgctgaccatgctgtcggtagtgaccggcgtgggcttcttcatccatatgtatgcctcttggtatatgcgtggggaagaaggctattcccgcttcttcgcttataccaacctgtttatcgccagtatggtggtcttggtattggcggataacctgctgctgatgtatctcggctgggaaggcgtgggtctgtgcagttacctgctgatcggtttctactacaccaatccggcgaatggcgcggcggccatgaaagcctttatcgtgactcgcgtaggtgacgtattcttggcttttgcgctgttcatcctctacaacgaattgggtacgctgaatattcgcgaactgatggtactggcaccgcagcagttggaaatgggctccaccgccattacctgggcgaccttgatgctattgggcggtgcagtaggtaaatcggcgcagttgccgttgcaaacctggctggccgatgcgatggcaggcccgacgccggtttccgcgctgatccatgcggcgaccatggttaccgccggtgtgtatctgattgctcgtactcacggtctgttcctgatggcgccggacgttctgcatctggtgggaattatcggtgcggttacgctggtactggcgggctttgcggcgctggtgcaaaccgacatcaaacgggttctggcttattcgaccatgagccagatcggttacatgttcctggcgctgggcgttcaggcgtgggatgcagccattttccacctgatgactcacgccttcttcaaagccttgctgttcctctcctccggttcagtgattctggcttgtcaccacgagcaaaatatcttcaaaatgggggggctgcgtaaaaaaatccctctggtttatatctgcttcttggtgggcggcgcggcgctggcagcattgccaatcgtcaccgcgggcttctacagtaaagacgaaatcctctggggcgcactggctaccggccatatcaacctgatggttgccggtctggtgggggcgttcctgacggcgctgtataccttccgcatgatctttatcgtgttccacggcgaggaaaaaaccaaagcccatccggttacaggtatgactcataacctgccattgctggtgctgctggtgctgtctacctttgtcggcgcgttgatcacaccaccgttggcgggcgtattgccagaacttcatttaggtgaagaaggcaaaatgccgctggagatcttctccggggtgattgtggtgatcggtattctgctggctgcggcactgtatctgggcaaacgtcagtgggtgaacagcatcgggcaaagcgcgattggccgtttcttcaccgtctggtggttccacgcatggggcttcgattggttgtatcacaacctgtttgtaaaaccttatctgtggattgcacgcttgctacagcgcgatccgctgaactcactgatgaatacgccggcatggattgcacgcttgggtaatcgcggtttgacgttcagtgagaatggtcaggtgcgttggtacgttgcctcaatgggtctgggtgcagttgtcatactggctctgttgcttttcgtttagaagcctgaataggctctttaattagggacacaaaacgccatgctattaccttggctaattcttatcccctttatcggcggtctgctgtgctggcagtttgaacgcttcggtaccaaggtaccgcgctggatagcgttaatcgcgatggggctgacgttggtactttccctgcaactgtggttgcagggcggctattcactgactaatccggcgggcattccgcagtggcagtcggagttctccttgccgtggattccacgctttggcattgagttccatctggcactggacggtctgtcactgctgatggtggtgctgaccggcctgctgggcgtactggcgattctttgttcgtggcgtgaaattcagcgctatcagggtttcttccacctgaacctgctatggattctgggtggcgtcatcggcgtgttcctcgccatcgacatgttcctgttcttcttcttctgggaaatgatgttggtgccgatgtacttcctgattgccttgtggggtcacaaagcgtcagacggtaaaacgcgtatctccgccgcgaccaagttcttcatttatacccaggccagcggcctgatcatgttgattgctatcctgggtctggtatttgtgcattacaaagccaccggcgtctggactttcaactatgaaaatctactgaaaacgccgatgtcccacggtgtggaatatctgttgatgctcggtttcttcatcgctttcgcggtgaaaatgccggtggtgccgctgcacggctggttgccggatgcgcacagtcaggctccaaccgcgggttcggtggatttggccgggattctgttgaaaaccgctgcttacggtttgctgcgctttagcctgccgctgttcccgaatgcttcccacgagtttgcgcctatcgctatgtggctgggtgttattggtatcttctacggtgcgtggatggcgttctgccagaccgatatcaaacgtttaatcgcttacaccagcgtgtcccacatgggctttgtattgattgccatctacaccggcagccagttggcttatcagggcgcagtgattcagatgattgcccacggcttgtcagccgcgggtatgttcatcatctgtggtcaattatacgaacgtctgcatacccgcgatatgcgtcagatgggcggcctgtggggacggattaagtacctaccagcgctttccctgttcttcgcggttgcgacgctggggatgcctggcaccggtaatttcgtcggcgaatttatgattttgtttggcagcttccaggtcgtaccggtgattactatcatctctacctttgggctggtgtttgcgtcgatttattcattaatcatgatgcagcgcgcttactatggtgcgccgaaatcggaagaagccttgccgggtatgagcctgcgagaactgtcgatcgtgttgctgctggtggtattactggtgttgttgggcctttacccgcaaccgattctggatacctctcatgcggcgatgagcaatgtacagcagtggtttaacgcttcatcaccactagtttcaccaaacataacaacaaggccgtaattcgccatgacaataactcctcaacaactgatcgcaatgctaccgctgttgatcgtcggattgacggtggtggttgtgatgctgtccattgcgtggcgacgcgatcatttcctgaacgccaccctgacggttatcgggcttaacctggcgctgctgtctctgtatttcgtcgggcaagtcgagccaatggatgtcacgccgctgatgcgggttgacggctacgcgatgttctataccgggctggtgattatcgccagtctggccacggcgacctttgcctatccgtggttggcagggtatccggataaccgcgaagaattctacctactggtgctgattgccaccttgggcggcattctgttagccagtgccaatcatttggcttcgctgttcctgggtatcgaactggtttctctgccgctgtttggtctgattggctatgcctatcgccagaagcgttcactggaagccagtattaagtatatgttgctgtctgcggccgcatcgtccttcctactgttcggtatggcgctgttgtatgcggaatccggtagcctgtccttcgccggtctgggtaaaagcctgagcgattctgttatccatcaaccgctgattctggccggtttggggatgatgatcgtcggtctgggcttcaaactgtcgctggttcctttccagctgtggacgccagatgtgtatcagggggcgcctgcgccggtttccaccttcttggctactgccagtaagatcgccatcttcgccgtagtgatgcgtctgtttatgtatgctccagcggcggacagcgaagtggttcgtctggtactctcgatcatcgccgttgcctctattctgtttggtaacctgatggcgatcagccagagcaatatcaaacgtctgttgggttactcttccattgcgcacctcggttacttgctgattgcgttggtggcggtgcagactcatcagttggcgctggaaaccgtcggtgtttacatggccggttacctgttcagcagtctgggcgctttcggcgtcgttagcctgatgtccagcccgtataaagggccggatgcggaatccctgttctcttatcgcggtctgttctggcataaaccgattctgtctgcggtaatgacggtgatgatgctgtctctggccggtatcccgatgacgctgggctttattggtaagttcttcgttattgcgatgggcgttagcgctaacctgtggtggctgaccggtgctgtagtactggggagcgccattggcctttattactacctacgcgtcaccgtgagcctgttcctcagcccaccggagaaactggtgcgcgatactccaagcaactgggccttaactgccggtggcgttgtggtgttgatttctgcgattctggtactgttcctcggtatctacccgcagccgttgattacgctggtacaaatggctcagccgatgttctgagtccggcaataatccgccaaacggtgggttaacatgctgagataaaaccccttgccgaatttctggcaaggggttttgctttttggggggaatgtctacatctcgtcgataaattaaaacctgattgggttttcccgatggccgaaggctgagaaataacagtctcttaatttttctgtttcagagagttggctggcgggtgtacggcaggtgccctgcctcgaacggagttttctgctagagaattcaggacagaagagggcacgctaaccgatgcggccaaacctaggtaccgccgagataaaatgacgttaaatcatgtttattaatattcttatgccagaatatggtcgtatttgatcagcaatctttatttttcggataaagaatggaatgtgttttcgaggctattgatcaccgcacgcacgcgtgctgcccgttgtacgtctggatgtaaaaccagccagatatccacgggatcctgccgttcaggccagattcgtaccagatcctcatcgttatccgccagaaaacaggaaagcagcgcaatgcctaaccctttttgcgtggcggaacgcagtaatatttgcgagttgctttgcaagacgacattgggttgaaccagcgtttcaccgcataaactttgccagtggcgaggaacgtcttgttgagggaacagcaagagatcgtgaccgcgaaagtgttcgccgggtcgagggacgcctcgcacagcaatatattcatgggcggcatataaacccatattgatcgtcgccagccgcttaatgattaactcattattttcaggtctatcgccgcgaatggccagatcggcgccgtgatgcgccatattggtgatgttaatgctggttgcgacgctataactgatatctggatgctgctgacgtagcaatttcaacgcgggaagaacaaatacttcggccagcgtatccgtggtgacaagagaaaccgtgccctgtaaccggtcgtcgccgttggccgctttacgattaatcgcctctgccgccctttccatagcaacagcatcggttagaagctgctcacccaataagctaagagtgaaatgttttggtgtgcgaataaatagctttgaatttaaggcatgttccaacgctgaaattctacgcccgacggtagcctgatcgacatgtagctcacgcgctgcctggcgcagagttccggcacgcgccacggcgagaaagaatcgtgcgtcatcccagttcatcaacttttcctttcggtatcagttcgtttatgcctgtaagtttaatgtataaatgcatcaagatgatgcatttatgtctgttttgatgcaattttgcaggcgtataatccagagcttcttttgttgtctgtgacaaggtattcccttgttgtttcaccgttttaggagccatttatgtctgtgggagttgcccctgctgcccgttatttcccggtgctgtgctttctggcgttggcgctgactgcggcattactgaatagcagcgcgccaacgccgctttacccgctctatcagcagcaactggggctcaattcggtcagtttgacaatggtgtacgccgcttatgccgctggcgtgttgatttcgctattggcggtagggaatttagcgggaaagattcgggaccttcgaatgatgattgtgcctgctctggtcacggtactggctggagcctggctgtttgctattgctgatacttttggtcgcctgtttgtggcgcgattgctggctggaattggcactggcgcgctaaccggtgcggcgaacctggcgctgatccgtttttgtccgccggatggcggcaagcgggcggcgttaattgccacgctttcttttaccgctgggttggccttggggccgatatttagtggtgtagcgttacaaacccattttcatcctacggtgctcccttttattttgattattgctatggccgcgttggcagcggcaggactcacattgggctggccggaaacacgcgccttgcggcataagaacataaagctaacttgcggggccagtggtgcagtgaaacctgccggcggtttactcagtggtctcaccgctacgggaatgcggtttttcttatgcgccggtgcactgtttgtctcttgggtggttgccgccagtattctggctatcggcccggcgattgcaaagcaactgttgtatttaccggggcaaggcggatttggctatgtgattgcggtctatctgctgattgcgggtatctgtcagttggtcagccgtagtattcctagccgtatttccctgtataccggctgtctggctcaggcggttgcggtgatgacctttgccgctgcgttgtattttcattcattgcttttgggtggcatcggcatggtcgtgaccggctacgcctttggcgccatctttgtcggcagtgccgcgttggtgaatttaatttcacctaaagccagccatgcccccttgctgtcgttattttatgtgatcgcatacaccgctaactgggttcccgttgcattgggatggatgatagatcgccacggattattatcagcagctaatcttctgttctgtctgagttcgccggtttgtttgttgctggcatgggggataaaacgcgccgcgttcttcgctcatgagtgatgttttgtgattcaagtcacgatatgatttattttattgcattgttaccataataagcgtgatttgaatcgctatgaaattcaccgattcgggtaaaatgcgctcattgctacctcccgtttattgaaccgaactttatcgcgagtgaatcctgatgaacattatcctgatgattgctatcactaccggcgtgctttccggcatttggggctgggttgctgtcaccttgggtttgctcagttgggcgggttttttgggctgtaccgcttatttcgcctgcccacagggtggaataaaaggattgattatcagtttgctgacctgcgctagcggcatcttttgggcaatgatgattattcagggcagcgcattacggccagagtggacgatacttggctacctgttgaccggcgtcgtcgcatttttaatgtgcattcaggcctgccagcaatggctgtcttttgtacctggaacctttatcggcgcctgcgcgacttttgccggtggcggcgattggaagctagtttcagcctcattattagttggattgatatttggctatgccatgaagaacagcgggctatggctggcggcgaaaagagagaaactaaagaatgaagacaagcagccaagggcaatggatatcgagccagaaagctgaaaagtcggtcatcggggcagttaaaacaaaagggcgactatccgccctttttgctggaatttacagtaaatgatttgcgactttgatcaccagtttacgcagtggtgccggttcgcttaaggttcccatcgggcggtgaagttctcctgggaatagcatcaccacatcgccgggtgtcagcgtcagcagggtttcttgcgtgataccttcgaacaggccgtaatctttctcgcaatcaaaatccatagtagggcgctgcccttgcgtaccctgcgccgccccaatcacttcgcttccttccagcagaatatgcaaatcaatgtaataacggtgcaattcaggcagttgctgagccaggggcttagtctgaccgataatatgattgagatagatttcgcggccttccagatccaattccccagcgggtagagccgctaaatccatctggcagaggcgggtcagcgtgcggcgaataaccgccggataaagcgggttattggcggcactcttcagttcatccaatatcataataagccttcttttttagtaatgtgaaattcaggcgtggcagtgggcggtgtcggcctgctctaatgctgtgatgcagttttgcacgacgccagccaacggcggggtgatatcaattttgatgatgtcccgctccgtggcgtctggggcttccagagtggcaaactggctctgtaatagactttccggcataaaatgtccggcgcgctgccgcattctggccagcaccagcgaataatcgccggttaaccatagaaattgaatatcctgattgccagcgcgtagtcggtcacgatactgctttttcagagaggaacagactaaaaaaccggtttcatttttctgttgcaggctgtaagccacgtcactcaaacgttctagccagggagcgcgatcctgatcgttgagcggctggcccgaggccattttctggatattggcgcgtgggtgtaaatcgtcaccatcgatgaatttggcattcagccgtaaggccagcgcctgaccgacgcaggatttaccggttcctgcaacgcccataacaataatgcatttgcctgtcatcattttcccctgtcactcattcccagtggcttaggcaccaccgcaagtcacattcactgaggccagtcggcttaaaccgcgaccagcataccgccgtcgatgaaaagtaaatgaccgttgacgaaatcggaggctttggacgacaggtaaaccgccgcgccaattagttcttccggatttccccaacgggcggcaggagtgcgtttacacagccagtcggtaaaggctttgtcttccaccaaggctttagtcatatcggttttgaaatatcccggagcaatgccattcacctgaatattatgacgagccaactccacgcacatgccgcgggtcagcattttcactgcgcctttagacgctgcgtaaggcgtaatagtgtcgcggcctaattcactttgcattgagcaaatattaatgatttttccgctttggcgtttgaccatataacgagaaacggcctgagaaaccagaaatactgatttttggttgaccgcaatgacgtcatcccagtctttttccggaaattcggtaaaagcatgacggcgttgaattccggcattattaattaatatatcgatagcacctatctgattttctatttgctcaatggcctgattcaccgcatcgtggtcggtgacgttaaaggctgcggcgtgggcaatgaaaccggcgtcacgcagctgcgccacggcgctttcagcgcgctccgtagtaatatcgttaataattatctcagcaccaaattcggctaaccctttagctaataaaaaaccaatgccttgggcggaaccggtgattaacaccttacgattttccaatgagaataagtttttcatggtgcattcctgatagcgccgtgagcgcgattattcggtaaagggtttcgccaacggcgaggttgagtaaccggttttatttttctggtaaatagacagaaagtttttgttaaattatccgtagccgtgaataagttgatttatataaatcaacgcggcctgccttcaggcgacattattattcacagttcggtattgttttagctcagtattgttatttgacctgaaaattgaattcctttcatttgaccaaggtatttatttatctggtgatggtttgaaatctgtcatcatcaaaccgttttttagcagggtaaaccgtgattaagatcactttaaattatgttacgccgagctgttactctttacgtgagctttatcccttttggctaaacaaaaaggctggaaagataaggattgaggaagggaagatggtgggtaatgaaactaacctattgataaaacgttggcttaataataaaaatcctatctgttatgccattttaagccagtaacatgcttttcattaccccagctaacagggcataatcgattcaactccattcgccttattccgtcaggtatctcccatgaaaaatcagcgtgttacgttacaagacattgcgttactggcaggagtgacgaaaatgaccgttagccgttacctgcgcacgccgaaaaaggtcgcgcctgagaccgctgcccgcattgcgcaggtcatggttgaagtgaactatgccgatggtcatgaaggcgaggggcgcgctaaccagcataatcctcgcatcggtattttggtaccttcctttaataaccagattttttccgatttactggcgggtattgaatctgtcaccgccggaaatagctatcaaacgttggtggttaactataactataataaagatcgtgaagaagaacagatcatcaacctgctttcctgccagatatccggcctgattttgactgattctgaacatactttacgtgcagataaatatttgaatgctgctgaaattcctattgcgcaggtgatggatttagagcctcaacctaatcgaattacagttggttttaataattatcaggccgcctatgatatgacttccacgctcattgccagtggtaaacagcatattgtctggtttggttcgatgtcggatgtacgtgatcgtaaacgttatcagggatacagccaggcgatggaagacgcgcagctatcacctttgcatatcactcctaacaaagtgtcatcggtatctataggttctggcatgttggcattggcgcgacaaatgtatccgcagatggatgcgatcttttgtactaacgatgatatggcggttggcgtgttacaggaatgcctgaagctgggtatcgcgataccggctgaaatggcgatttccggctttcacgggttggatattggtcaggcaactacgcccgttttggccagcgtgactactccgcgctatgaaatgggtaaagtagccgcagaaatcttaatcaagaaaatcaaaagtattcctactatcgaacaggtggatcttcattatcgcatttctctgggtgggactatttgatatccgcgataatcattgctgcctgaacccgttaaatgctttcagtccgaatcatgtccgataaccgtgggtatgtagtggtatcgccacgttggttattggctactgattatctggcaattgataatattgcaagcgaataaattgatttatggttaaaggaattcgttgaatggaaatattataccgacgcaatgatagccagctcacgttgcaggtaacacgttttcttaacatgatttacagtgaccagtatcacaaaataaagtattgaaaaaaggttttataacggcatcgacaaaataaacggaacagaaagaaattagccgtggatgattaaaaacattaagaacagcgatgtaattaaatcatccaatcattgtttaataatggctaactgcttcggttattttttattttattttactgtcaggtgctcaatgatgaaaaaaaaccaaccggccgtgctgattattgctccagtaatggattatctgaccgataaactggacgctaactttaccgttcataaactgtatctattggatgatgccgccagttttctgcgtgaacagggagggaatatcaaaggtgtggtaacccgcggtgatattggaataagcaatgaagttatggcgcaactgattaatttagagattatctcaatctttggcgtcggtactgatgccgtcgatttggaatatactcgcgagcgaaatattattgtgaccaatacgccgggcgtgctgactgatgacgtcgcagacaccgctttggggctgattatcaccacctgccgccgtttctgtcaggccgataaattcctgcgtgctgggcagtggccgaaaagcagtttgccgctgtcgacaaaagtaaccggcaagcgcctggggatttttggcatgggacgcataggccgcgctattgcgcgccgtgccgccggtttcgacatgcaaattgcctataccgataatactcacgatcgtgaattgccttatcagtttgtgcccgacctgatcgatttagcgcgtcaaagcgatattttggtgattgccatttccggagggaaagacagcggcggtctgattgatgccaaagtgtttgccgccatgccggaacatgccattctgattaatattgcccgtggcaatatggtgaatcaggatgatctgattgcggcgctacagcaaaaaactatcggcggagccggattggatgtgttcgctaacgaacctcatgtgccgcaggcattaatcgagttggaaaacgtggtgctattgccacatattgccagcgccaccgttgaaacgcgtatgcaaatgagcgacatggtattttctaatatctctgcttatttctctgagcaaccggtaccgacggcgattaagtattcattagtttgagttgattcgtatcagggttaattaatttagccctctcgaaataataataaaaataaattatcacatcgtgcattttaaaataactggcaaattaattctaatttgctgacggtattctctgcgccagccatccgaatcgcagagtaaatattgctatagaagaggcgtgttcaatatggacagtaagattcctaatgcccgttggttccgcattattgttcccatcatgattgcctgtattatttcctttatggaccgggttaatatcagcttcgcattacccggtggaatggaaagcgatctgggtattaccagccagatggctggtttagccggcggcatcttctttattggttatttatttctgcaagtccctggagggcgtattgcggtacacggcagcgggcgtaaatttatcgcttattccctgtgcgcctgggcggtcgtatccattctgaccggatttgtgaccaatcattatcagttattattcctacgctttgttctgggcgtctctgaaggcggcatgttgccagtggtactgaccatggtgagtaattggtttcccgagcgtgaaattggccgagctaacgcttttgtgatgatgtttgcacctatcggcggcatgttcaccgcgccgctttctggctatatcattaatatattggactggcgctggttatttattctggaaggcacgctatccgctattgtattagtgatgtggtggtttgtgattagcgatcgcccggaagaggctaagtggctctctgaaaaagagcgcgattatctggtgactgaattagcccgtgaacgcgccgaaaagatgcataataaactggtcacccatgcgccgctgaaagccgtatttcagaataaaggtctaatgaaactggtggcacttaatttcttttaccaaaccggtgattatggttataccctgtggttacctaccatattaaaaaatctgaccggtggaaatatggcgtcggttggcgtattagccatattgccttttattgcgacaactttaggtatttacgctatttcctatctatcggataaaaccggtaagcgccgtttgtttattatgctttccctgttctgttttgccgctggattaatcacgtcggtcatattccgccataacgtgatggtgtcctatctgtccctggtgttctgcggtttcttccttaaagccgcgaccagcccgttctggtctatccccggccgaattgctattccggaagtggccggtggggcgcgtggagtgattaatggtttaggtaatttggggggattctgcggcccgtatctggtgggcgtcgtgatgtttttctacggtcaaagcgcggcggtttgcatgctggcggggtcgctggtcattgccggtttgattacgctatccctgccaaaagactgcgatttgaatgtggctcccaaggaaaaaaaacctgtcgatagcgcgttagctaaagtgaaaaccgtttgaatcaggcggattgggcgctgagagtgcccaacctgctgccggagatgactatgaacttatcccaacaaattgccttatgtcagcaacacttacaggtactgcagttttcccatttcaaccatcagctagcctggtcgctaggcgaaagcatcaggcaacgcgccgagcggcaacatcttgcgctggcgatagaaatcaatgtgaatcatcagtgtattttcagttatgccatggcaggaaccacgccggaaaatcaggactggctgcgccggaaacggaatgtggtggagttactgaatatcagctcttacgaggccgggctgatgttgcaacagcggcaaaccacgcttagcgagcgctacggcgttaatccacgggattatgccgcactgggtggtggttttcccttgcagattaggcaatcgggcgtgattggcagcatcaatgtatcgggcgccccgcatctggatgatcatgagttcctcctgctgacgctatctgagtttatcggtttgcctgcgggcagcgtggaatccctccgcgagctggacaatacgctatgacgataaatccaacggtggaacgagttactcagcgaattgccgctcgctctctggctacccgaagcgcctatttgcagcgcatagcggcggcaaaggagtgccgagtacgccgttctctgctgggctgtggcaatctggctcacggttttgcagcctgccagccggaggataaaactgcgctaaaaaatcagctaagcagcgatatcgccattattacgtcttataacgatatgttgtccgcccatcaaccttatgccgattacccgagtcagatcaaagctgctttgcatcaggtgggtgcggtggggcaggtggcgggtggcgtaccggcgatgtgtgatggcgtcactcaagggcaggatggcatggagctttccctgatgagccgggatgtgattgccatgtctgctgccgtggggctttctcacaatatgttcgatggcgcactgtatctgggggtgtgcgataaaattgtgcctggtctgctgatggcggcgttgtcttttggtcatctgccagcgatttttgtcccggcggggccgatgggaagcggtttaccgaataaagagaaagtgcgtattcgccagctctacgccgaggggaaaacggatagacaggctctgttggaagttgaggcggcgtcttatcacggtgccggtacctgtaccttttatggtactgctaattccaatcagatggtgatggaggttatggggctgcatttgcctggggcgtcttttatccagccggacgatcctttgcgcgaagccttgaccgcagcggcggcacggcaaattacgcgactaaccgaagtcagcgggcagtatttaccattgggaaaattggtggatgaaaaggttatcgtcaacggcattgtggctttgttagcgaccggcgggtcgacaaaccacaccttgcatttggtggctatggcgcgggcggcggggatcatcattaattgggatgatttctccgatttgtcgaactgtattcctcagctttgccgaatttatcccaatggcccggcggatattaatcattttcaggctgcaggtggcgtcgcgcttttagtgcgggaactactgcagggcggtttgctgcatcctgacgttgaaaccgtggcgggctttggcctacggcgttatacccaagagccttatctctccgcgggagaactgttttggcgtgaaggcgtggcaaaatctctggatcgagcggtgattgctgacttattgcagcctttcgccattcacggtggtaccaaggtgatgagcggtaatctgggaagaggggtgatgaaaacctcggcggttcctgcggaatatcaggttattgaagggccagcgctagtatttgatagtcagcatcaggtacagcctgcctttgatgcgggattgctcaatcaggattgcgtggtggtggtgcgttatcaagggccaaaagcggtaggaatgccggaattacataaattgatgccaccgctgggcgtgttattggatcgcggctttaaagtggctttggtgaccgatggtcgattgtctggcgcatccgggaaagtccctgcggcgattcacgttacgccggaggcctactgtggcggactgttggcaaaaatccgcagcggcgatcgagtacgagtgaacgggcataccggtgagctaacgctgttggtcgatgaatccgagttggagagacgccaacccgaggagccagatttatcccgctttcatcttggctgcgggcgcgagctgttcggtgcgttacgggaaagcttatccggtgccgagcagggagcctgttgtattcgattttagcaataaaaaacggcgagtgcgcgttatcaccttcgccgttttgccgtggtcgcagctgattgcccgtcacgcatggcgagcgttaacggattgttattcaatgcgaaacagctttatctctgtcctgatgcggttattttgtgattttgcgttttcggcctaatacaaaaatcagcgcgattaacaccaatacgcccacaaccatagccggggccatataaggctgtagtttcgccagcagcggaaccggcccaccggcgcgcaactcagcgacatcagcctcgctaacgctcacctgcggattgccgtaattctgtaaaacgtaattggcaatcaacgcaatctctttgtcattcaaataattgacgtaggattccgggccaaagttaggcatcaacacatgttcatttcccacttttcgatcgacaccgaataacatggcagaaatcaggttcgccggattgctggaaccggtagcggtgttattgaacagggatggataagcctgatttttgctgccgctaccgtccggttgatgacaactggcgcagttaccgctaaataatgccgcaccggtatcctgcgtatgattggcggtcgccggatgcaggccgcgcaatccttcctccacattaaccggttggccaaactggtctgccgcctgcctatccagcgggtcgcgtaccggcttggtacttttcaggtaaaccgcaatcgccagcaggtcttctttgggtaaatattgcaggctgttttgtaccgcttccgccatgccacccgccgcctgatttttacccttggtacgaccggtagccaaatattccacgagctgctcattgctccagccgccaataccactcactggatctgaagtaatatttggcgcataccaaggcccaaccatgccaccggcgaaagctttgccgtggttttcgcccatcagcagattacgaggcgtatggcaggtgtcacagtggccggggccgttcaccagataagcgccgcgattccattgttcactttggctagcgtcaggttcaaaacggcctttgtcgaggaacatcatgttccagccgatcatggcaaagcgcatattgaacgggaaaggcaattccgtcgggatattttcctcatccaccgctgcaacgccgtgcataaagtaggcgtacagcgccttaatatcctcgccgctcaggcgtgtgtaggaggtataaggcatggcgggatacaaatgactaccgtcagaccgaatgccgtcgcgtactgctcgggcgaactgttcttcggtgtagttgccaataccggcagctttggacggcgtgatattggtggagtaaatcacgcccatcggcgagctgataccgtagccgccagcgtaaggtgtaccgccttcgggcttggtgtggcaagcctgacagtcagaggcaatggcgacttgctcgcccttgtgaatccattcctgctggctgagagaagcattgtccgctgccagcgccgctgcgctgatgaaagagagagaaagcaagaaagcgccgattcgttttttcatcatttgcccgccattgaacgagccatatcgtcggctgctttcaaacccagcgccgccatagtcagggtgctatttaccacgctggcagagggaatggcgctaccgcccggtaaccataggttggcgtgatcgaaggttcgacagtttccatccactaccgaatccttcggatcgctgcccataattgttccacccataatatggttgttggcattcagactggtggtgattttgaattcatcggcttcaaacagttggccgatatgctccagctgtttgtgcgcggcctcggcaccctgacgtacgtagtcaccgacatcgtaataaatatccgggcacggcaagccgtgggcatctgtgcgggttttgctcagtgtcagacggttttccggatcgggcagcggttccaggctgatcgacaaatcagcgccgtaagccgctcggcggcggatttcctcatccagttccttgccgactaggcccatctccagcgcttgctgagtcgcaggcaaaacccggttgatattgttgagaatcatcttgttagccgaataatctttacggaactcgccgtcccgtgggccaaccaggcaactgctttgcgccgggccgcggcctagccacagcggttctttggccaaaaacgtacagtgaaaaccggagtggtccatcatgttgcggccgacctgatcggaagagttggcgataccgttcgggtttttctcattcgccgcgatcagcagtagtcggggcgtttcaatcccgttacaggctaatgcgaaggttttccccgtggctttatgagattgtttctggttatccagccagtgtacggcggtaacctgattatcctcatcggtatcaattttgtagaccaccgcttccgccagtaccgccgcgcctttcatttctgcgcgttcgatgtgatggataccgttatacatggcaccaattgggcagatcggttggcagttattgttaccgcagcaggtcgggcggccttcccacgggcgggtactgcgtccctgcggaatgggcaccgaattatagccgtgagggttaaccacttcggcaaagcgagtatcgccgtaagcccaaggcacactatccatcggataaggtttactgcgttcagacggagattgtttagccggatcgttcggcccggctacgccaatttcgtcttctgcacggcaatagtagggttccagttcgtcataagaaatcggccaatcgcgccccacgtcgtatagcgttttcatctggaaatcgttgggaacgtgacgccagcaagatgcggcccaatgccaagtggtgccgccgacggtgcgtaaataaccttgtttaaagctaccggcgcttgggccgctgagttcgacgtaattattttccgggaaatacagcggcgcggtggcatattttgactgcggataaagcccttgataatccgagccagtacggttatcaaacggcatattacgccagttttctacggcctgaccgcggctgatgcgcagaccggcttccaatactaataccgagtagccttggctgactaattggtcggccatcatgccaccgacaataccggagccaacgatgataacgtcggcagaggcgtcaccattggcgctgaaaataggttttttcattaggaatggctcacattgtcaggcttaggcaaattgatatcaggtggggcggcggtccaccacagcggaccgttaccgcagtaggttggcacgatcaggccatcgctggcagggcggtacatcagcgcatctttgtaggcgattaacaccgcctgctggccgtgtcctacggtgccggtgtaccaggctgccatgatgttactgaccactttttgcagattatggccactagccgcagccaacagttgctgggcgcgttgttctggctgcatcaatgtggtgagctggattatttggtcggcaaactgggcgtcactgttgtgtagtgcggtaaaaatccgtgccgacataccttgatcgatatctttatgttcggtcagtgcctgagacaatttgaagaagcgagcgaaagccagtgggttggcagcggcggtggcctgttcggctttagtcaaaaatgggtaacctaaaagtgaggttgccaccatcgcggaggccacgccaaacagcagttcccggcgggtgaaaccggttccatttttttccggctcaataacattgcgagatgaaatcttttccatcgagagtctctcttggatcgggtgtggtgctgaacgtcagctttgaaaatgaattattgttattttatgtagcgtttttttagaggttatatggccgcagagtgggcaaatacagtgtgagagtgtcattcaccaaggaaatcatcactcttcaatgagcggtaaattaacaagctattaaacaattttcaataagattgattaggtgtctaactatttgttgataatttgcacggtttttaacaatcctaattcgtggcgcgtcggtgagggaatttagtgccaatcttcatcaggatcaaaatggtaagcccgattataagctatggttagtagggaaaggttatagggtgtaattgattttttaatcacggagaagtcacatgagcagagtaaatgaccctcaacaaacctcgttagatgacgacttgagcatgttgaccgacacgctggaagaggtgttgcggtcatccggcgatatgggtgacgatggttatcagattgtgaaagcccgggctgaaaatgcgctgaaagcagtaagagatcgcctgaatggcaccactgattgctatatggaacgcgccaagcaggcggcctgtcgtaccaatgaatacgtgcgcgaaaaaccctggcacggcgtgggtatcggcgctaccgttggcctgatcgtcggattgttattggctcgtcgctagcgataaatctgatggagtgactcaacggctcatttatgtatgagccgttttttttggccagcatattgcgttttttcagtcagaaatccacggaaatagttacgtgtgcgactaatgattagtttttcatgtgttatttttaccagggcaacataaatcatattactattatcatcttatgtatttaggtttgtttaatttcatctataacaatgattaataggtttgtggcgattatataaactaaatattgtaatttattaagacgctgtaattcataggtatgagtttatttttaaaatgtattatttttttctagcggatgagccgttttgttttctttaaaattaatagatatttttattggctcataacctactgatcagttggaggaattcggaatcgtcaattattttgcgattttaaaagtgtgatgagcgtcacgctaaatggaaaaaacaaaaaaacgtatttgaaggcttgagtatataaactaaccttaatcttacttccggaatactaatgaaatggcaattaatgtattcactggaaatgttgaattaattttattatctctatgtaaatattgattttttctttactttctcatgtggttcaggggctggtcttcgctaattttttttcacccataatattttcttttgttttgttgacgttttcactcttatttattcttgtaattaaaatagagattttatttttgactttaaatcttgggtcggtgttgattgccgatatcgagacgtagcaatgcagtttgttttatttttttattttacacacagcgctttatctaaagcgaaaaactaatgttggaaggatatatattatgccgaaacaaatattaattaaagtgtctcaggaatttagcgatttctgtaaaagcaataatttctcacttgctgcattccgtggagcaagtgccagtaatactaatggggttccggttgtttggtttaacgtggctaataccaatattgttccgaataatccgataaacgttacttttgatccttcttatcaggtttatgactctttggtggatcaggtaattcctgatggcagtgttaccgtagggcaatccatgtcggcgaaactaagcgacagctttggtattgtggccaaacagctaacaaaactgtccggtggtggtattcctacggggatccgtatcatcaaccaaactcccggggtgaatattgtggccggtctggcaggggataatggcgtacctattgcagcctttgtgtgtaatccgaatgttaatttattcctggagcccttacagaccgtaacgatttcgctaatcggatcagcctttggcgttggtactgcgattgttaaagcgaccgggccatcggtattattggatcttaccagcaataatgtggccaacattgaatataatgttttaatgggcgaatgggacttatctgtaggttcaccgactgtacctttaactcaaattcctgcggatacggcaatgcagccatttgtattgccaggaatgaacagtgtaaaactaaaacagttagcgtctctgaatgccgaggcagtgaaataacgtaatggatattgaaaatcactgaatacccgcttctggcgggtatttttttagggataatcttagcttaatgtaggccaatgttgtttatggcatccgcggtatccggtgctaagtgtgtaatagaacttcttttctgatgttcactccgtataatcacattctttatgttgatataccgaggtgcgcgtgacacaactctctgatttgctggaagaattacggcaccttttggatgctgactttcccgatcgggccggtgtccgacagatcgctttgccagcccctgccgtgcttggcagtcaattgctggaatggttggcaacgcagcctgtttttccgcagttttactggcgtcaccgcgatggacatgaagaggctgcggtatgtggtcaggtgcgtttattccgtgatatgtctgccgccgatgaatttatccggcaatataaaaatcatgccggattacgtatttgggggctgaatgcctttgaaccctttccggctatcgccaatgaaacagacatttcctccgctttcttttttctaccgcgattgcaattgctgcgtcgcggtggagaaattagcctgacgctcaatttagccagtgaaacctccctgcaacaggatgtttgtctggcgctggatttcatcgagcaattactcgctccgcggccaattcctgaactgacggtcagcgttgaaactcttgttcaccagcccgatcaaaaaggctggtgccaactgctggaacaggcattacgggccattgccaaccagcagatggaaaaagtggtactggcgcgcatgactcatctgaccctgcgggaaaccttattcagcccggcatttatggccgccagtcgtcaggttaatcaccagtgtttccactttatgctgcgttttgacgatcggcgggcgtttctgggctccagtccggaacgtctgtatcgccgtcagcaatcacagttggaaaccgaggcgctggcgggaaccgtggcgaatgataaggatgatgccaaagccgcgtgcttagcccattggttagccggtgacgataagaatcagcgggaaaacctgctggtggtagacgatatctgccagcgcctgcaaggcggggtttcagcggtggatgtgatgcctgccgaggtgattcgtctgcgcaaagtgcagcatttgcgccgtcggattcgggcgcaattacagccgaatgtcactgatgccgattgtctacagcgtttgcagcccacggcagcagtggcgggattgccacgtgaaccggcgcggttgtttatcctcgatgcagagccgttttctcgcggctggtacgccggttcctcaggctatttttcattggcgcaatcggaattcgcggtggcgctgcgctcggcgcaaatcgagggcgatcaggttcagatttatgctggcgctggcatcgtcgccggttctgacccattaatggaatggcaggaaatcgaaaataaatccgctggattacgcagtctgttggaaaaataagcccttagtcgataaccactaactaatagtgggtaattacccctaccgcctatgagggcggattgtggcgttgattcggcaggtgtaaactatatcgccgttattcatcggtaaaactttggcctagcgcagggcttttccttcgctgccgagtaaaaatatttatttaggctatcagcctgttaactgactgttgagcgaaccatgtcgacaagcgtctttaaccgccgttgggcggccttgctactggaggcattgacccgccacggtgtgcgtcatatctgcattgccccagggtctcgctctacgcccttaacgctggctgcggcggcgaatccgtcgctggtttgccatacccattttgatgaacgcggtttggggcatttggcgctagggctggctaaggcttcggctcagccggtggcggtgattgtcacttccggtacggcggcggccaatttgtatcccgcgctgatagaagccgggctgaccggcgagcgtctggtctttctgacggcggatcgcccgccagaactaattgactgcggcgcaaatcaggcgattcgtcagcccggtatgttcgccagccatcccaatgcgagtctcaatctgccgcgccctacgccggatattcccgcaagttggctggtttccagcctggataacgcgatggcgcagttacagcaaggggcattgcatatcaattgtccttttgccgagccattgtacggcggtgatgatagccaatatgccgaatggtccgcggcgctgggagactggtgggaacgccgcgagccttggttaaaatcctcatatcctgttagccatgccgttcagtctgattggtatttctggcgccaaaaacgcggcgttgttattgccggacgcatgagcgcagaagaaggtattcaggttgctgagtgggcgcagcaattgggctggccgctattgggggatgtgctatctcaaaccggccagccgctgccctgtgcggatttatggctagggcatccgcaggcgcaaaaactgttacagcagacgcaggtggtggtgcaattcggcagcagcctgacgggcaaacagttattgcaatggcaggctcagtgtcaaccggaagaatactggctggtggatcatttagcgggtcgcctcgatccggctaaccaccgcgggcggcggttgttagccaatatcgacgaatggttggagctacatccggcgcagccgcgagccccttgggccggagagctggctttgtggtccgacagcgccgaaggctgcgtggcagaatatctgaacgacaaatttggtgaagccacggtggcccatcgactggcggaattactgccggaaaacgggcagctttttgtcggtaatagcctgatcgtgcgtttagtagatgcgctaggccagcttcccgctggctatccggtttacagcaatcgcggcgccagcggcatcgacggcctgctttccaccgccgccggtgtgcagcgcgctaccgccaaaccgactctggctatcgtcggcgatctttctgcgctctacgatctgaacgccctggcgttactgcgccaatgctcggctccgacggtactgttagtggtgaacaataacggcggacagattttctccctgttgccaacgccggaagaagatcgccagcgcttctactgcatgccgcagaacgtcagttttgatcatgctgccgctatgtttggcctgcgatatgcctgtttgtccagttgggagaaactgcacgaagaggtgcagcaaagctggcaacagggcggtatgacgctgattgagctaaaggttccggctagtgaaggggcggaaacgttgcaatatctggcgcagcgggtggcggaactgtgacgctggcctgccgcaccgtcaattcgcacactggcacgaaaccctggctggtctggctgcacggtctgttgggcaatggcgaagattggtcagaggtagccgggcgctgtaccgaatttccctcgctgtttgtcgatcttccgggccacggcggttcggttgctcaagcgcccggtgattttgccgaggtcagccgtcagctaaatgcgacattggcggcgcaaaatattcaggattattggttgataggctactcgctgggtgggcgcattgccatgtatcacgcttgctgcggtgaacataccgggctgcgtggtttgttggtcgaagggggaaatcccggcctggaaaacgaagaactgcggcgagcgcgtctgctacgtgatacccattgggcgcagcgttttcgtcaggaacccatgacgcaggttctggctgactggtatttacagccgattttcgctgatttaaccgccagtcagcggcaagagttcatagatttgcgctcggtcaatcagggtttcacagtagctgctatgcttgaatccacctctttgggtcgccagccttatctgctgcctgcactgcaccagttggctataccttttgcctacctgtgcggtgagcgagaccttaaatttcagcaactggcgcgccagaaccggttgccgttacacacccttgccggagctggccataatgcccatcgggccaatcccgatgcttttgccgagcaggtgcgtttattcttatcactctcccgttaaaggaatgcttaatatgctgtatccgagcgaagaacaattgtacgccgccattgaatggcaggactgctcagccgggtttgaagatattcgttatcataaatcccgtgatggtatcgccaagatcaccattaaccgccctcaggtacgcaatgcgttccgtcctcagacggtcaaagagatgattcaggcgctggccgatgcccgttatgacgatcatatcggcgtgattattctgacaggcgaaggggataaagccttctgttccggtggcgatcagaaagtgcgcggtgactacggcggctatcaggataacagcggtgtgcatcatctgaatgtgctcgatttccagcgccagatccgcacctgtccaaaaccagttgtggccatggttgcaggctattccattggcggtggacatgtattgcatatgatgtgtgatttgaccatagccgcagacaacgccatttttggtcagactggcccgaaagtcggttctttcgacggcggctggggcgcggcctatatggcacgtatcgtagggcagaaaaaagcgcgtgaaatctggttcctgtgccgccagtacgatgctaaacaggcgttggacatggggctggttaacaccgtggtgcctttggccgatctggaaaaagaaaccgtacgttggtgtcgtgagatgctggaaaacagcccaatggcgctgcgctgcctcaaagcggcgctgaatgctgactgcgacggtcaggctggtctgcaagagctggcgggtaacgccaccatgctgttctacatgacagatgaaggtcaggaagggcgtaacgcgttcaacgaaaaacgccagccggacttcagcaaattcaagcgtaatccgtaatgcgtcgggcgagtttatatcgctttagtctgcctatggaggcgggcgtgattctgcgcaaccaacggctgaaaagtcgcgatgggctattggtggaattgagcgaaggtgaaaacagcggctggggggaaatctccccactgccggaattcagtcaggaaacgctggccgaagccgaagcggtgacacagcgatggttacaggcttggctgggcggagagcaaccggcggaaagtcctttgccttcagtggcttttggcctgagctgtgcgctggctgagctgaatcagacgttgccgatacaggcggattatcgtaaagccccgttgtgtaacggcgatcccgatgagctttttgacgtactgatggcgttgcccggtgacaaagtggcgaaggtcaaagttgggctatatgaagccgtgcgcgatgggatgatcgtcaacgtattgctggaagccttgccggatctcactttgcgtctggatgccaatcgaagctggacgcgtgccaaagccgacggatttgccaaatacgttaatcccggattgcgttcccgcattgcttttctggaagaaccgtgcaaaacccgcgacgaatcccgcgcttttgctcgtgaaaccggtattgccattgcttgggatgaaagcgtgcgcgaagccgattttcaggtgcaggccgagccgggcgttgcggcaatcgtgatcaaaccaacgctggttggcagtatcaaccgatgccgacaattggtgcaacaggctcatcaggcggggttggtagcggtaatcagttccagcattgaatccagtctggggttatcgcaattggctcggctcgccagttggctaacgccggatacggtgccggggttggatacgctggatctgatgcaggcgcagctattacgcccgtggccagacagtcaattgccgctgatttcgctggaacaactggatcgcatatggcgcggctaaaccagtggccatggcggcactgggcggagttgcaaccgcagaaagaggcgctgcggctggaaggtcggtctatcagttggcaacggctggtggcggatatcgacgccgtggcggccagttttcatcatcagggcgtggcggcaggccgtggcgttgcggtcagagggaaaaacagctatggcttgctgctggcctatctgggcgctttacagtgtgccgctcgcgtcctgccactcaatccgcagttacctgaaactttactgcatcagctgcttccggggctggatatcgattttattttcgattctcacgggagcgacttggctggcttagagctaacttctctgaccgacagcgcggcgtcgcctgtaacgccgcaaccttgggacgggcaacgtctagcgacgctaactctgacctcaggctcctctggtttgcccaaagcggcagcacatcaactcgatgctcatttggctagcgcggaaggggtattgagtctgatgtctttccatactgacgatagctggctgttgtcattgccgctgttccatgtttccgggcagggcattatttggcgctggcttagcgtgggtgccacgttagttattcggccaatgcagtcattatctgcagcgctggcgggatgtactcatgcgtcactggtgccgacccagctttggcgtttgttgactcaaccttcggaaaaactgagcctgacggacgtattgttaggtggcgctatgattccgactgaattgaccgagcaagccgaagcgcgtggtattcgctgctggtgcggttatggtttgacggaagcggcttccacggtgtgcgccaagcgagccaatggcaacgccggagtgggcgtggcgctttcagggcgacaggtgaggttggtggatcaggaagtgtgggtgaaaggagattgtctggccgcaggttattggcagcggggcaaattacttcctttgactgatgagaacggctggctgcacacccgcgatcgcggtcagtggtttgaggacgaactgcatattcttgggcggctggataatctgtttttcagcggtggggaagggattcagccggaagatgttgagcgcattttgctgcggcatcctcaggtttatcaggcatttattttgccggtgaacgatagcgagtttggccagcgtccggtcgcggtgatcgaaagcgatccccagctttcatggtcagaactggccgattggctagcaccgcaggtcgcgccatttcagcgcccagtggctttctatcgcttacccgatgaattgaagaatggcggaattaagatctcgcggcgttcggtgggggagtggttaaggtgatgtttttgtttgcgggtattttcgctaccggaaaccaagattgagtcgggtttcgaaagtgtaaccgttcggtttttccttaactcggttgggctgggaagtgatgtattcactaaactaatatcaaccgaaactggatgcggttttagatatgaattggctttgactttaaagcacgtatttgagctttctcacgtcaagattggagccggtttcgtaagcccagcagttcactgtctcctcacttgccgtggaggcttccgagcagggttggcgcgaaagtggggttctgcgaacgtccctcgggcgcgctttgtccggcgggtcagcgctagattcgcctgcgggcgttatcaggatgccatgccatcctggccctgcggctcaaggcgcgctttcaacagctgacggctgttcactcttggcctcatccctgctcggcccacttcctgattgcgcctgttgagtgcaaaaccagtgttcttacgaatcacaatttgcctttcgtttttgatagggcttttgaccttgagtttgatttttcagagcacatttgagcggctgagacgatgagtgagggaacctacttagtgggcaggcgatacgtgcggaggcgcggattgttaaggctcgcgcttacgagccttaactcggttgaggctgttgaggtgagatattcaccaagctaatatcaaccgaaaccagatgcggttttagatatgaacttctaccataacgctttttagccgcgcgatattagcttagccccagtgcctttttcacacctattccatagtctggatgtacttgctcaaacagcgctatctgacggcgttgaatctcttctggcacctgcgaaagttccccagcaatacgggtaaacatgcgctgatgttcttcttcgctcaacaggttaaataaggcccgtggctgactaaaatagtcatcgtcatcgcggtgattccagtgatccgccgcaccggtcagcgtcaacggtggctcgctaaaatcaggctgctcctggaataaaccgaagctgttcggctcataggtggcggtattgctgctgtttccgtccacgcgcattgcgccatcacgatgatagttgtggaacgggcatttggcgccgttaaccggaatctgatggtgattaacgcctaaacggtaacgatgcgcatcgccgtaggagaacaggcgaccttgcagcattttgtctggagagaagctaatgcccggaaccacgttggccgggttgaacgccgcttgctccacttcagagaaatagttctctgggttacggttcagttcgaaatatccgacgtcaatcagcggatagtcaccgtgtggccaaactttggttaaatcgaacggattgtacggaacttccgaggcttcgtgctccggcataatctgcacttgcagagtccaacgagggaaatcaccgcgctcaatggcttcgtacaaatcgcgctgagaactttcccgatcggaaccgatcagtttttccgcttcatcatccatcaggttttcaatgccctgctggcaacggaaatggaatttcacccaataacgctcgttctgattgttgataaagctaaaggtgtggctgccgaaaccgtgcatatgacggtaggattttggtaggccgcgatcgctgaaatcgatagttaactggtgaagtgattcaggaagctgagagaagaaatcccatttgtaggttgggttacgcaagttggttcgcggatcgcgtttgaccacatggttcaaatccgggaatttcaacgggtcgcgcagataaaacaccggcgtatcgttgcccactaagtcccagttaccttcttcggtataaaacttcatggcaaaaccgcgaatatcccgctctgcgtcagcagcgccgcgttcaccggctaccgttgaaaaacgcacgaacatatcggttttcttaccgatctgagagaaaatcttagcgcgagtatacttggttatatcgtgagtaacggtaaaggtaccgtaagcgccagagcctttggcgtgcatccggcgctcagggatcacttcccgatcaaagtgagctaatttctcaagaaaccagacatcttgcagtaacatcgggccgcgagggcctgcggtcaccacgttattgttgtcgacaacgggtgcgcctgctgccgtagttagtcctttctttttgctcatcatgttctccagtatcgctgttgaattgactgcgggtgttgaaatgagtctgagtgagagactctgttaaaaattggacttattgccagatgacaaagaatgactttagcgaatcgccgctgactgttctttgatccccccactagttgtagctgtataggtcaccttcggcaaatagatataggttatcgctgggattaaatctacggcggaacgattcatcgcatttagttacaatcatatgaaatgatgagttatttattcggttttttctggcttgttatgggaagcttttcggttaaactcatggcgggaaagctctgtcggcaagttgcgcggcagataattgaataataacgagagattatatgagaaagacacttattgcctgtgcagcaagtttgctgtttgtagcaggttcagccagcgcgatcagcgtcaccgcagaagcaggacgtcattacactaacctcggtgtcggtatgggcaccaacagcggcggcctggctgtgagcggtaactgggcgcgtagcgaccacgacggtgacatgggcagcttaggtctgggcttcaacctgccaattggcccattgatggcgaccattggcggtaaaggtatctatatggcacctgaagacggtaaaaacggcggcgcaattgccgttggcggcgggttgagctatccgataaccaaatcattcactttatacggtgaaggttatgtagcgccagaatccctgaccagtgggatgaaatcctacaccgaagcgaacgccggtgtgcgttggagcgtgattcgcccgttgacggtagatgttggttatcgttacatcaatatggaagggaaagaaggccgtcgggataaccgtctggcggatggcatgtatatcggtgccggtctaaacttctgatttcatgcgttgaaaacaaaacgggcgctgggtgtgatacccgcgcccatttttttatgtagagatactcggtttctatgtggagatactaggtataaaacctgttatttcagtgtattaacccactgcgggtaataccccggcgacaataccgacctgaatcgcaatcacggttacaccgcaggtaaataccagtgccagagctggtttaccgccccaaacacgatagtttttaccctgatgcatctggcgcgctttccaggccagtaacgaaggcaaaatcagcgccagcaccgatagggcaacggcggcaaagcccagcgccatgacaaatccgcgtgggtaaaacagggcgaacagcagcggtggtaggaaggttattacgccggtttgcagtcgaccgcgcaccgtattacgacgcttaaataaatctgccagataatcgaataaccctaaggctacgccgaggaatgaggtcgccagcgccaggtcggcaaacaggtgtaccgccagttcaacgtgtggtgaggcgacgacttcacgcacggcctgtaataaaccgttcagaccggcctgctgcgccagaataccgacaaaggtatgagaagaaatcgcgcccagcgtcgctaattgccagaaaatataagcgattaatggaatggcgctgccgatgataaacacccagcgcagtttgcgaatattaccgcccatataattgacgatacttggtacgctgccgtggaagccgaaagaggtgaaaatcaccggaatggcagacagcgccagcccttgctccaagggtaaggtcagcaggttggctttttccacgtgcggcatcattaatgccagcattaccacgaggaaaataattttcgcgctgaataaaattcggttaaataaatcgactgaatgggtgccaatgcacacaactccaccggctatcaacgtgaatagcagtacgccgagataggtcgggaagctctgctctgtccattggctgatactggttgccaaaagctcaccggcgccgctgatataggcagaggtcaaggcgtacatcaaaaacatcatgctaaagccggttaaccactgaccacggctgcctagatagcgtttggccaaagtgcccagaccggtatcagccgcttcgtgttgatatacttcaaccaataataatgcggtgtagcacatcaatagccaaagggagaccagaagggtcaaggttacgctgaaacccacgccagcggcagcaagcggcatcgccagcatccctgcaccaattgtggttcccgccacgataaaaatactgccaagagtgcgattcttcacgctttcctctgctaaccgacattttattgaaattattgagtgcagcagagtagatgatcccattaattctgtcaaatcgacgttacaactgatgtaaaattatgtttacactcggttgttgtttgatttatcaggttttattttaaagttgttgcgggcgcggtggaaagagtagaaaagattgtgtttcaccgaggctgttcttaaagtgtgagtaagggaatttgcggagagaaaaatgctgagaattgagatgttaagcaccggcgatgaagtattgcacgggcaaatcgtggacaccaacgccgcctggttggcggactatctgtttactcaaggattgccgatgagcagccgggaaacggtaggtgacgatttggaagcgctcatcgccgtactgctagaacgcagccatgtagccgatgttctgatcgtcaacggcgggttggggccgaccagcgacgatttaagcgcgatggcggcagcacgagcctgcggggtggaactgatcgaacatccacagtggattgcccgtatggaagcgtttttcgccgagcgcggaagagtgatgtccgccactaatcgcaaacaggcacacataccggccaacgctgaaatgctggataaccccgtgggaactgcctgcggttttgcgttccaactgaataaatgtcagatgtttttcactccgggcgtgccttctgaattcaaagtgatggtggagcagcagattgtgccgcgtttacgggaaagttttccgcagattgcgccaccgctttgtttacgtatgaccacttttggccgttcggaaagcgatttggcgatggagctagacccgctgccgctgccggaaggcgcggtgctaggttatcgttcttccgcccctattattgagctgaaactgaccggcccggcttcacagcgttcggcgatggaagaagtctggcagcaggtgcgtcaggtggccggtgaaagcctgatttatgaaggcacagagggattacccgcgttggttgccgggcagttgaatcagcgcggattaacgctggcgctcagtgagcaatttaccggcgggctgatcaatttacagctacaaagcgtgcaggcacctttagccggtggggaattgctgccgttatcctgtgtggaaactttgcctgagcttgccgcccgcgctcagtcgttggctgccctgtgcggtgcgccgttggtattggcggttagcgcaatgaaaggtgaaaatcttagcgtagccttacatacgccaaacggtactttcggacagacggttcgctctcaggccagccgtcacgggttaagaattcgacaggaaacgagcgcgatgctcggcctggaaatgctgcgtcgctggctggcaggaggcaaagtctgcggtcagcacggctggctgacggtgattgaaatgctgtgatatcacggcgcaaataaaaaagcagacagtgccatcactctgtctgctttttatctatttcgtcgatttttattgccgccgcggattatttttcctgcgcgctgtgtacttctttactggcttcccacagacgatatttcacttccacgccttgaggcacgtataccacgattggcaggcggctgttataacgctgcatggtattgttacccagattggcggtaacaaatgccggatgtttagcgctttctggacaggccatctgggttgataaaactccggagatttcattcattaccagatagtcgtaaccccagccatccagagtatgggattctaacttgccgcccaacatatggtggttacagtcaatttccagatttttgccaatcaacaattcaactttaaagcgatcttcatctggccgctgcggcagataaataacctggcggctcatacctgtttcagcggctgggaagggcgcgattttttccagcggctgctgttctggtgccgtattgtctgcggcgatagctccggcggaggcggcaagcagtaaaccggcgatcagggaaaatgttttattcatattgatttctccttgcgattaatgccgataattttaacacaaaagtatcataaggttagtatatgcaattggctataatcatattattcatagatgattatagccctgattttttgttaaaatgctgaatataattttacaatgctcgttttataaaatgaaaaactaaattttgtcttattatacctcctcatagtacaaggtatgtatgtgcccaatgattccaagggtacgtgattccatatttctattcattattgttaatgaatgaatattttttatatattgatttactgtaattgtaataaggagaggctatgaatgttggtatgacatcaggcgtttatcagattaataattcaatggaaaacgtcgctgaaattaaacgtggttctcagttcactcattcgttggctaaacttttaactaaagtaaaaaatgtctacatttcacttgttacctcggtgaggtcatcagcagtatcgaaaggggaagataaaacttcccctgaagtgaaatcagaaggacggttacaaaaattgctaaccggaattaaacaattatttggctctttatccacatcctttaatatcgacaaatcaaaatcatcagcagcgagttttacgttacacagtctatttgatattaaggaggtagagcgcggcgatgggattgaaaaactttgtaaaaaaataaaagagactgcaaagcatgaagatattcttactatgtttaggacgtcaccgtcgagcgatgatgcacaagaaataaaacaaaaaaggtttggcttcgaacaattttgttcaagtcagaattgtactcctgaggttttgtcctcaattttcaaaaaagagatgagtcatcttttgcctaaattagataataatgattttaagcgtcttcctgatattcatcccgaaaataaacaaacgcttgatgattgcaaaaacgcggtacggaatgtcttgatagagaaaattaatcagatgcctgcggataaaataaaacttgtggttatgatgctcaatacgctagcagaagttaaaaaagtggcaatagataaagaggaccatactctaagagacatcaatggacttaaccgctatgtgattccccatttgattggtgatgatcttgaatctcgctatttagaaaaaatacccggtaccaataagatgatgaaagatgatattgaagctaagttaactacgccatttaatcactggcaacatctatctatagcgcaatctggttacgtacaggtatttaactgagataaaagttgggtggtgatatgtttaataaaaaaccgcgctaggggcgcggtcatcagtagtttactttgttttatctgtctgcctgaaaaagtgcgttgcagactaaatttccagctcaatatcacccaccggttggcagcagcaggggagaatttccccgtcttgtacaaaggccagcggttgctgggcgtagcaaacttcgccttttagcaaacggatacgacaagaaccgcaatagcccgagcggcattggtattcgacctgaatctgatgctgctccagcacttccaacaggttggattcattatcgggatagggcaactgcgtacctgaagtacgcagattgataatagatttttccatgcaattaaagctggaaatcactcaaatcgtcggcgctgacttcggaatcaatctgaccgaccagataggagctaacttccacttcctgcggggcaacctgcacgttgtctgacactaaccaggagttaatccatggaatcgggttggtgcgggttttaaacggaatgcctaaacctacggcctgcatacggatattggtgatgtattccacgtattggcacagaatatctttattcaggccgatcatcgaaccgtcgcggaacaggtattctgcccattctttttcttgctgcgcggctagtacgaataggtcgtaacactgttgctgacattcttcggcaatttcagccatttccggatcgtctgcaccggagcgcatcaggttaagaatatgttgagtgccggtcagatgcagagcttcgtcgcgggcaatcattttgatgatcttggcattgccttccatcagttcgcgctcggcgaaggcgaaagaacaggcgaagctaacgtagaagcgaatcgcttccagcgcattgacgctcatcaggcacagatacagctgctttttcagctcgcgcaggttaacgaccacggttttaccgttgacctgatgggtgccttcccccagtaaatggtaatagctggtcatttcaatcagatcatcgtaataagccgaaatatctttagcgcgtttcagaatttcttcatttgtcacgatatcgtcaaataccaccgccggatcgttcacgatattgcgaataatatgggtgtaagaacgagagtgaatcgtttccgagaacgaccaggtttctacccaggtttccagttcaggaatggaaatcagcggcaataaagccacgttcgggctacgaccttgaatggaatccagcagcgtttgatatttcagattgctgataaaaatgtgtttttcgtgttccggcaacgcgttgtaatcgatgcgatcgcgggaaacgtcaatttcttcagggcgccagaagaaagaaagttgcttttcaatcagcttctcgaaaattgggtgtttctgttggtcgaaacgtgccacgttaacggactgaccaagaaacatgggttcgagtaactggttgtttttgttctgagaaaaagtggtataggccatgatgtcctcgaggatatcgcaaaaggcaaaaagaaatggccctcaggatgactcgatttttgcgcggccgaaacggcagggcgcaaaatgatcaaccgccagccaatcgctgaatggattgtccggcgggagggccttaactaaaaatcaaatcttacacgcaccgccttcgcagtcgtcgtctccgggctgaccctgaatgtcttcctgcacatcgtcagccccgtcgcgggtgttttgataatacagtgtcttcacaccaaatttataggtggtcagcaggtcttttagcaattgcttcatcggcactttgcctgatgggaaacgggccggatcgtaattggtattagctgaaatggcctgatcgacgaatttctgcattaaaccgaccaattgcaggtagccatcgttatttggcatttcccacagcagttcgtaagcctctttcaggcgttcatactcaggaacaacctgacgcaaaataccgtctttcgaggctttgatactgacatagccgcgcggtggctcaataccgttggtggcattggagatctgcgaagaagtttctgatggcatcagggcagacagcgtggagttacgcaggccgaattcctgaatatctttacgcagcgtttcccaatcgtagtgcagtggctcatcgctgatcgcgtccaaatctttcttataggtatcgatcggcagaataccttgagaataagtggtttcgttaaaccactggcatgcgccttgctcacgcgctaactgattagacgctttcagcaggtaatactgaatggcttcaaaggtacggtgagtcaggttatttgcgctgccatcggagtaacgcacgccgtttttcgccagatagtaagcgtagttaatcacgccgacgcccagagtacgacgacccatagcgccacggcgagccgcttcgatcgggtaatcctgatagtccaacaaggcatccagcgcgcgaacggccagaatagccaggtcttctaattcatccaggctatcaattgcgccgaggttgaaggcagacagcgtacaaagcgcaatttcaccgttcggatcgttgatgtcgttcagcggtttggtcggcagcgcgatttccaggcacaggttggactggcgtaccggcgcaatcttcggatcaaacgggctgtgggtgttgcaatggtcaacgttctgaatgtagatgcggccagttgatgcacgttcctgcatcatcagggagaacagttccaccgctttgacgcgttgctgacggatgctgctgtcctgctcgtactgggtatacagacgttcgaatgcttcctgatcggcgaagaaggcgtcatacagccccggtacgtcggacgggctgaataaagtgatgtcgccgccttgcagcagacgttgatacatcagcttgttgatttgtacgccgtaatccatgtggcgaacgcggtttccttccaccccacggttatttttcaacaccagcaggctttcaacttccagatgccacatcgggtagaacagggtggctgcgccgccgcgaacgccgccctgcgagcaggatttcaccgcggtctggaaatgcttgtagaacggaatacagccggtgtggaaagcttcgccgccgcgaattgggctacccagcgcacggatacgaccggcgttgataccgataccggcgcgttgagaaacgtatttcacaatggcgctagaagtggcgttgatagaatccaggctgtcgccgcactcgatcagtacgcaagagctgaactgacgggtaggagtacgtacgccggacataatcggcgtcggcagtgaaatcttgaaggtggacactgcatcatagaaacgcttgatgtaatccatgcgggtatcacgcgggtagccggagaacaggcaggccgcaaccaggatatacaggaattgggcgctttcgtagatttcaccggtaacgcggttctgtaccagatatttcccttccaactgcttaaccgcagcgtaggagaagttcatatcgcgccagtggtcaataaaaccgtccatctgctcgaagtcttcagcggtgtagtcttccagcagatgcttatcgtatttgcccatgtcgaccattttgctgacgtggtcaaacagttttggcggctcaaactggccgtaggcttttttacgcagatggaaaatcgctagacgcgcggccagatattggtaatccggtgcgtcacgggagatcaaatccgctgcggctttgataatagtttcatggatatcggcggttttgatgccatcataaaactggatgtgagaacgtaattctacttgagatactgagacgttatgtaaaccttccgcggcccagtcgatgactcggtggattttatcaaggttgatgcgctctttgctgccatcgcgtttagtaacaagtagactttggttcatgtgttcttgaccttttttcccctgttcagcctacataaaacacaagtctatgctctccttgattgcagtaatcattgagggcagtagtgcattgttcagtatgtaaacactatatgtgggggtagtatgttggtgagataacaagatagtgagaaacgacgattttagcaagtgaacaaaaccgacgaattgtgtggataacttgggggtgaaatgttaccaacggcttacaacctgcgtcagcactggagatcttgctccctcagtctgggggataagattttaccgaaaatcttaaaaatttgattgtttgacgctttattaaacgttagaaaaaaacgcgataaggtctctgttttaatgtcaaaaaaagcggcttggatcgcatttttctgttgacggcgcataaatcaacgtatttcggatagaagctgatcaatctgataaaaattcgggcgacgcgcagttggccgccatcgcccttaaagctatgaactattcaacgctacccattaagactctcttgatccctttgggtgtgcagcatgtagttgacgtctacgttgcgaccgagcttaaagtgatcggtcagaggattataatgcaggccaataatttgcttttctcgtagcggagtttggtcgatccaaccgatcaattctgacggacgaatgaattttttcgagtcgtgagtgcctttcggtaccattttcaaaatgtattcagcgccaactaccgccatcagccaggatttggtattgcggttaatggtagagaagaatacgtggccgccgggtttaaccaaacgggcgcaggcgcgaatcaccgaagccggatctggaacgtgctcaagcatctccatgcaggtcactacatcgtactgctgcggatgcgcttcagcgtgagactcgacggtttcttgtacgtaatcgagcttgacgccggtttccaaggcgtgcaaacgagccacttgcagcggctcggtgcccatatccagcccggtgactactgcgccttcccgcgccatactttccgccaaaatgccgccgccgcagccgacatccagaactttcttaccgaaaataccgtctgcgcgttgcaaaatatagttcagtcgcaacggatttatccgatgaaggggtttgaattcaccttctaaatcccaccaacgggaggcgacggcctcgaacttggcgatctcgctttcatcaacgttagggcggtttgctggggtttctgcacgcatggctgaatatcactcctctatctctttgcgcggattatacatgctccccgcagattggcgcagttttgtatcgtcagcctaagtttcatcggaagcttgtggaacaggaattcgaggataaacttggcatattcacgtctgtagtttccccaaaatctgcggtttgtgatatagtttcgtacctttgaatccggtaattagtagagggatagcggctcaatgagcgaccttgccagagaaataacaccggtcaacatcgaagaagagttgaaaaactcctatttggattatgcgatgtccgtgattgtgggacgtgcgctaccagatgttcgagatggattgaagccggtacaccgtcgcgttctgtttgcgatgaatgtactgggtaacgactggaataaaccatacaaaaaatcggcccgtgtagttggggacgttatcggtaaatatcacccgcatggtgacagcgcggtctacgacacaattgtgcgtatggctcagccgttctcactgcgctatatgctggtggatgggcagggcaacttcggttccgttgacggcgactccgccgcggcgatgcgttataccgaagtgcgcatgtcaaaaattgctcacgaactgctgtcggatctggaaaaagataccgtcgattacgtgcctaactacgatggcaccgagcagattcctgccgtcatgccaactcgcataccgaacctgctggtcaacggcgcgtcgggtattgccgtcggtatggcaaccaacattccgccgcataacctttctgaggttatcgatggctgtctggcgtatatcgaagatgaaaacatcaccattgaagggttgatggaacacatcccagggccagatttcccaacgggcgccattatcaatggtcgccgtggtattgaagaagcttatcgtactggccgtggcaaagtgtatgtccgcgcccgtgctgaagtggaagctgatgctaaaaccggtcgcgaaaccatcattgttcacgagattccgtatcaggtgaacaaagcgcggctgattgaaaaaatcgccgagctggtgaaagagaaacgcgtcgaaggcattagtgcgctgcgcgacgagtctgataaagacggtatgcgcatcgttatcgaagtgaaacgcgacgcggttggggaagtggttcttaacaacctgtattctctgactcaattgcaggtcactttcggtatgaacatggttgccttgtctcagggccagccaaaattactgaatctgaaagatattctggtggcattcgtgcgtcaccgccgcgaagtggttacacgccggactatctttgaactgcgtaaagcccgcgaccgtgctcatatcctggaagcgctggcgattgcactggctaacatcgatccgattatcgaactgattcgccgtgcggcaacgcctgccgaagcaaaagccggtttaattgccaatccgtgggaactgggtaacgttgcttccatgctggaacgtgctggcgatgatgctgcgcgcccggaatggttggaaccagagtttggtatccgcgacggcaaatattacctcaccgagcaacaggctcaggcgattctggatctgcgtttgcagaaactgaccggtctggagcatgagaaactgctggatgagtataaagaactgctgactttgatcgctgagctgatctttattctggaaaacccagagcgcttgatggaagtgattcgcgaagaattagtggcgatcaaagaacagtacagtgacgcacgtcgcactgaaattaccgctaatacttccgatatcaacatcgaagacctgatcagtcaggaagacgtggttgtgacgctatcccatcagggttacgtcaaataccagccgctttctgattacgaagcgcagcgtcgcggcggtaaaggtaaatcagcagcccgtatcaaagaagaagacttcatcgatcgcctgctggttgccaatacccacgacactattctgtgcttctccagccgtggtcgtctgtactggatgaaggtgtaccaattgccagaagccagccgcggtgctcgtggtcgcccaatcgttaacctgctgccgttagagccgaatgagcgtattaccgctattctgccggtgcgggaatacgaagaagggcgtcacgtctttatggcaaccgccagcggtaccgtgaagaaaactgcgctgaccgaattcagccgccctcgcagcgccggcattattgccgtcaatctgaacgaaggcgatgagctgatcggcgtcgatctgaccgatggtagcaacgaagtcatgttgttctccaccgaaggtaaagtggttcgtttcccagaagaacaggttcgttcgatgggtcgaaccgcgaccggcgtgcgcgggattaacctgaatggcgatgaccgcgtcgtgtcactgattatccctcggggtgacggtgagattctgacggtgacagagaacggctacggtaaacgtactgcggtagaagaatatcctaccaagtctcgtgcaacgcagggcgttatctccatcaaagtcagtgagcgtaatggtaaagtggtcggtgcggttcaggttgcgccaactgaccaaatcatgatgatcaccgatgccggtactttggtgcgtactcgcgtttcagaagtcagcattgtgggccgtaatacccagggtgtgacgctgattcgtactgctgaagacgagcacgttgtcggcctgcaacgagttgcagagccagaagacgacgatgaggatgaagcacttgaaggtgaagaaggcagcgcagagaactctgagctgccagcagcaccggaagatgatgccaccgacgcgccggaagacgacaacgcataatgttaaaacaggtgcggaaaatcgcgcctgttattgactgctgtgatgaaaagacaagccagcctcagtgctggcttttttatgtgttatcggtagtgtattctgttagcagaactgcccatccggcaacgttttcaccatggtatccgattgaaatatctttcttcttttcgaacaacgctaaaaatatcccgctatttattccgggtacttgccgttatgctgtggtcgctaggcgcactgctgaccaccttctatatcctgaatattctgaatgagaaaaaatcggatattcgtcaggaatataataccaatttcgaacaggcgcagaattacatccggcattctgctgatattatccgtgatatcagatatatggcggaaaatcgcctcagcgagctcagtaattccgtcgagatacgcagcaatggcatggcgcataaagccggtgagccaaaatattatccgcttaatgtcaacgctgaatgtggcgatctgcgttcttcgtaccattcttcgctggaatcgctgagcgatctgattctgtactggaaagagaactttgccgctgcgtacgaccttaaccggatctttttcgttggcgctgaaagccgctgtctggttgatttcaatatacgtaatacgccgttggatcagaaaaacctgctttccgctctgcatgaacatatgcagaaatatatggatgcgaaaaatcaggataaagacaacactctgtattttgtggtgcccggcgcgcgctcagataccggttatctttatgtgctaacgccggtgtttattggcaataagctggaagcgttgattggtactgagcagacgattcgtctggaggactttatctcagcgggaaccttgccgattggcgttactttgctcgatcagaataatgagccggtgcttcgtctggctaccggcgaacgctatgcctctatgctggatgaatatccggactcaccctcctattttggctatgcagatgattataacgacctgatcctaaagaagaatttactgccttcatcgcttagcattgcttattcattgccggtgaaaaccgtggttgaacgttttaagatgttgatttttaacgcgctgctactcaatgctttgtctgcggttgtgatttttactttagcctgggtatttgaacgcaaaatgttccgcccggcagaaaataacgcttcgcagctggaagaacacgagcaatttaaccggaaaatcgtagcttccgcgccggtggggatcagcattttgcggctcagcgatgggactaatatcctgagtaatgagttggctcataactatattaatttgctgaccaacgaagaccgggaacgcattacgcgaattatctgcgatcagcaggctaattttgtcgatgtgatgaccagtaataacaataatttgcaaatcagcttcgtccattcccgctatcgtaatgaagacgtggcgatctgtgtactggtggacgtcagttcgcgggtcaaaatggaagagtcgttacaggaaatggccgccgccgccgagcaggctagccagtccaagtccatgtttttggctacggttagccacgaattgcgcacgccgctgtatggcattatcggcaacttggatttactacaaaccaaggagctgccgccgggcgtggaccgcttggtcacggcgatgaataactcttccggtttactgctgaaaatcatcagcgatattttggatttctccaaaatcgagtcagaacagctaaaaatcgagcctcagcccttctcctgcgtggaagtgattactcatattactgcgaactatttgccgctggtggtgaaaaaacggcttggcctgtactgctttattgagcctaacgttccggtcatgatgaacggcgatccggtgcgtttacagcaggtcatatccaacttattgaataacgccattaaattcaccgataccggctgcattattgtgcaggtcaggctgcacggtctgtatttggaattccgcgtacaggataccggcgttggtattaatgcgaaagaaatcaatcagttatttgaccccttctttcaggtcggtactggcgtacagcgccacttccagggaacggggttggggctggcgatctgcgaaaagctgatcaatatgatggatggcgatgttgaggtgaattccgaaccgggtatcggcagcgtattttcaatccgaattccgctatataacgcgacgttaccgacgcctccgactggcaaatgctggaaggggaagactttgctgatggaagtgcggaacgcccgcctcgaatcttatctgaccagcctgttttgcagttacggcgcagatattcagcgttacaacggtcaggcaacccgtggggatgaggtgctgattaccgattacattccgcaagtcgccacgccgctgttggcgcgaattcatttttctatcgaacatataggtttaccgcaggaaacccggccaggctactgggtggtcagcacttcaacgctgctggaagccgttcctctgttgcatcgaattttgctggatgtatcgattatgacgtccacgccgctgcaattaccggtgccggataaagataatcaggtagataatagcgatatgcgtattctggtggtagatgaccatccgataaaccgtcgtttattagctgaccagctaacgtccttaggttatcaggtgcttacggctaatgacggcattgatgcattgacggtattgggtagcaatcctattgatatcgtgttgacagatgtcaatatgccaaatatggatggttatcgcctgacccaatgtttgcgcgaacaggagctgcatttcccagtgattggtgtaacggctaatgcgctggcggaagagaagcaacgctgtctggatgcgggaatggatgactgtctgtctaagccggtgacgctggatacgctgcgacaaatgcttaatcactacagtgaaaaggtgcggcaggggcggtgagtggatttgaaataataaacccgacgcgagaaagccgggtttattggtaggaaaaccgctttattaccctttatattactctttatcaacctggctgatgctgacggaagacaggtaatttagcagggcaatatcgttatccacacccagtttcagcatggctgattttttctggctactgatggttttgatgctgcggttcagtttccgggcgatctctgtcaccaggaagccttcggcaaacaggcgcaacacttcgctttcttttggagaaagacgtttgtcgccgtagccgttagcgctgattttttccaacagtttagccacgctttccggggtgaattttttccctttctgcaatgcggccaaggctttgggtaaatcggtcggcgcaccttgtttgagcacaatcccatcgatatccagatccaaaacggtgctgagaatcgccgggttattattcatggtcaaaacaataatggccagatgcggaaaatgacgcttgatatatttgatcaacgtaatcccgtcaccgtacttgtctccaggcatggagaggtcggtaatcagaacgttggcatcaagttttgacaagctgtttatcagtgcagtggagtcttcaaactcaccgactacatttacccattcaatttgttctagtgatttccgaatgccaaacaaaacgattggatggtcatctgcaataattacattaaggttgttcatgttatgggttaccttgctgcaacagcctactgacgaacgaatcaatctggctgatgctagtttcgatcttcaactgatcgccgtttgcgatatgctgttctaatgtttcacacagttgcttgccgagaaccagattcaacatagcaaacacgcctttcaatcggtgcgcggtctgcgagagcgatataaaatcacgttgctgggcctcagtatacagtttcttcaaatctaccggtactgtctcaacaaacagcgcataatagtcactagattttaactgttgctcatatccggaaatatcatcctcgacagggttttcttccgctgtttccacgctatgagcggactcataggaagaaatctgctgctctatcagtaacagaatggcgtctatcaccgcgctgccaaggttgtagttaacccgaatatagttctgttgcaactgttgtaaacccggctcgtctgaagtcagtaagagggtataaggcgcatagttttgcgggttatccgttaacattacgtcatactccctgcccggcagacgatcgtctgcaataatacaatttgcaccgaacgcattcagtagcgtagtcacgatggatttcacttcatctgaagtaatatccagcatcacggttacgccatctagtaatttctcctcttcatcttcttgattttcgtgcaatcccatagcaacgcggacggtgtaacgggtaccgatgtccactttactgcggatttccagctgcccgttcatttttttgcataactgattgcacaaaaagaacgtcagaccagagccctgactatagcgatcaaccagcgtttggcttaggaacggatagctgagattactgatttcttcgtctgaaataccggcaccggtatccacaatctgaatagtcagtaactctggatgctcaggttcatgtttcaccgttaaggtaattttaccgtagctggtggtcacaatggcatagttcagcaacaacgctagcactttacgcaatgcacgttcatcaccgatataggttttgtctacatctgccaaataatggttgaataaactcaatccttttcggtttatggacggcaaagcttgcagcaatagctcatcgatcagtctggatagcgagaaattctgctgttccggttgccaatcctgcgtttccagacgggtgagcagagtgatgttatcgatgagcgttagcacgctatctgaatgctgaaccaactcgttgactagagactcacgtaactctggatcggtgtccggatgctgtagcaaccggtgcgctagctgatttaacatgctaaccggttgattcagctcgatgcccagattatgcaacatcagcttccgcgcctgtagattcttatcgtattcgcgccgcgccatttgcagttttttgttcaccagtacttctttatcctgatcgtgcagcaggaaaaggtaagtttttggggataatcgactgcggaacattcgtatttcatatacttcgttgttaaccgttccctgaatgaccccgtgatgctgttctgccatatgggcaattttttgcaaattaagatgaggcagcaagtgctcggcaattttgttgctggccaccagcttactggtcgcaaagttatataccagtaatcctaaaggcaggctggcaataatttcctgattcagagacttctgtgcttccaattgctcggccatatcttcaccggggcgaacatactgatggcgaatcaaatagatgcacagcagcgtcaggccgaataagaacagattagttaagatcagccaggaattattgcgcgccagatcgagggccagaccggtcaagggaacgcgatacactactttgagcgaggcattggccagcggagcggcaaactccagccatgaaccgttaatggctaccgaggcggtagccaaatcttccggagccatcccgccatcgccaattggcgtgttgtccggctggagcaggaagctggagcgcgccatattgactggaatcagatcgttaatcggcaaatcaaaggcgataaccgtcgccagatggccgggatggttgaaggtggttctgagcgtaaaataataggcattttgaaaacgctgtttacgtaacggagaaaaactttcccgctcatccagcgtattggcctgttgcagcatttccgcccggcgagactcagcggacgctgtcaggtaggtttccttaaagcgggtggtgagctcttttagcgactgagtcgtaatcagaatcaggctgttatcctgcccgttcaggtagtacatggaaaaggtgtcgctctgtgaaccccagcggctatccagatagtttgacatacgcaaagtcatgcccagcgtggctctatcatgattaccgaaaatcaccgcatcagttttagctctgggtttttcaatgaaataaacatcaggccgcaggcgggtttcttctacacccgcgggtagcacctcatcggcatcattgtaggcgggattggtcgccaactcgtaaatctgataggtattgtagcgataatcatcaatacgctgctgcaagctggtagcgatattattcagagcaaactttttttctgccagatatgcgttggtatagttgtagccgtagagacccacggcgatcagcaatagcaggataaacagccaaaaacagcgggcgatattggtcaggctaagaggtaacgaattattttgcatagggataacgctgattccttgattaacgcgttactgtccgggcgctggccgttacgctgagtaacagaaccgctacgcacccgaaggcaaagggcaaactactgagctgtgcgataaaacctatcagcgcaggacctgccagaataccggcgtagccaatggttgtcattgaggcaatggctaaattcgttggcataacccgctgattgcccgcagcggtaaacagaatcggtaccacgttcgaagcccccaacccgaccagcataaaaccagccatagttgccgtaggattatcaaagctgatagcaataataaaaccggcggcggcaaataggctaccgcccaataatacggcatagcggcctagtttattcacgatacgatcgccgttcaaacgccccatcgtcatagcgatggcaaaaatagcgtagcccatgccggcctgagaaggttcgataccgcgtaagctagtgagaaacaatgcgctccagtccaacattgaaccttcagccaaaaacatcacgaaacacaggaaaccgagaaacatcacccagcctttagggcgtacaaacagcgggccatcgtgtggttctccgctgcctgccagcaggtttctgttcgccatcgccagcaaggcaataatgactattacggtaatcaacaccgcgactaaaggagagagacctagccacagtagcgcactgactccgccagcaccggcgataccgccaacgctgaacaggccgtggaatcctgacatcatggcgcgaccgctggccttttcgacaatcaccgcctgaatattcattgctacatcaattaccccgatagcagccccaaatagcagcaatgccacggccatgctgatgggagtatccatcagtaccagcagcggtaaatccagacacaaaagggcaccggcaatcaaaataacccggcgacagccccatttcgccgtcattacgccggtcaacggcatagccagcagggatccaacgccaatacacagtagcagtaaccctaatgacgcatcattaagagcaattctggctttggcgaaggggactagcggcgcccaggcggccattgccaaaccggcaataaaaaaggccaggcgggtagcgatctgttgaggaacgccgggcagttcgtgttgttgctctatttgggtgctcatgttgattttggcttgtcgtgagggtgaataactaaaattgagacttgtttctatcacaaagcgaaatccgggtcgaagatattcacggcttcggacggattaatcgtgggttagcgtgctgggttgataaggtctgggtcgtttcattgggggtaattcagcctgttattattttctctggattttttaatgattaaaaaaatttaataatatggtttggcggtgattcttccagtgattatctatttttatcatataaaaaaattcatacacatcgtcagggacaaaaaaaccataaaacaacgataggtcaattggcgaactgcttgattaaatgtaaagccattgcaattagttagttaactttttgtcaccccgaatgaccctttaaggttcgccccgtcattgattcccctactttttatcatgattagtattcactcaaataatgaaaatatttttgtacaagcgttgaaatatctacttatatctaagtattagcttttgaagtaactacgcaaaattttaacaaaataaatgtatttatcgtgccttggttcatttttacgttgtcatcaacaccgaaaacaagcttaaacccagattaacaaggtttactttactctcctgcgtctgactacccgccctggggtggttttacgtggaggtcgcgtcctgcttgctttgtgaggttacctatggcgaacaccgctgccggctcagttgatatcatttcccgcctaaatggcaaacaaatcacccatgttgccagtggcaatcaaattgtggtgcttaatgaacccagcgtggtgcgtatccatgcggctacggatagcgttgttcgctatgagcgtcaaggtaacgatctgattttacatatgaaagatggtagcaccgtacgctatcaacactttttcaaggcagatgcagaaggccactacagtgagctggtgtttgatgacggcttgcatcaaccggtctatgccgtcttccctccgacgctgttggccgcagggggcgaaaccgttgctctggtgccggaatttgccgccatcgatgggctatccagcctggtcttaagcgacggtattgcctccaatgctgtgctggctggcgttttaggctttctggccatcggtgccgggattggtatcgcagcgggtagcagcagcggtggtggcagcggcggcggtaatcccaatacgccgactttgacggtaaatccgttgaccggtgacaaccgtttgaacgcgaacgaaacccatgcatcacaggtattgagcggcgagacaacctttattgctgcgggtcagacagttacattgattttgaacggcgtaacctataccaccaccgtcggtgccgatggtaaatggagtttcaatctgcccgcttcggtactagagggtctgcaagacggccgctatagcgtgattgtcaaagtgaccacgccaggcggacagacgctggaaaaagatttcacgctggaagtggataccgttgcgccagcgctcacggtttcacctttggctggcgacggtattctggaaggcgcggaactgactcagccgctggtggtgaatggtaccgcgtcggctggagatgcaggacaaaccgtaaccgttggctttaacggacagacatataccaccacggtaggatctgatggcagctggagcgtgacaattccgccttcggccttgaccggtatcagcgtgggttctcatccggtcacggtgaccgtttccgatgcggcgggcaatactaccacggtaactcaacccttgaccgtcgcgggcaatgcttcgctgactatcggcgattttgcggtgaataatattctggatggagcggaacagcagcttaatcaaaccattagtggcagtaccaaaggcattaccaccgggcaaactgtaactgtaactttgaatggtaaaacctacaccgcaaccgtggatacgaatggtaattggaacctgtccgtacccgccgccgatctggcgttgctgatgaatggcactagcaccattcatgcctcggttaacgatccggaagggcgtcaggtcaccggcagccatgatttcatggtgaataacaacttcagcgccatagctatcagcccggtgtccggcgatggcctgattaatgcgaccgaagcgcaaagcgatatgaccgtcagcggcagtaccagcaatgttgctgccggtactcaattgacgctgactttaaatggcaaaacctatactgcgaccgttggcctcaacggcagttggagcgcgcagattccggcggcggatctggcattgctggccgatggcaacatcacattgactgtaagcggcactgatgccgccggtaatccggtcagcggatcgcagcaactgggcatttatatccacgatctgccgtcagctagcctaaccttgccttttggtgatggttcattgaacggcgttgacgtgcaggggaatcagacattaagcggttcgaccggagtcagcggtgcggggcaaaccgtgagcgtcaccattggtggcatgacttatccggcagtggtagcagcggacggcagctggtctgtcagcattccgacttctaccttacaaggtttggggcaaggcccgcagccgatctcggtgacggtgagcgatatcgcaggtaacaccaatacccaagtcacgccggtattggtggatactttcgcgccgaccataaccctttcccctattgctggcgacggaacaattaacgcagccgaagccgcgttaccggttgccattagcggtacttcttctgaagcgggctcgactattacggtgagtttcaacggcggcagctatatcggcgtggtgcaaaacgacggtacctggagcgtgaatattcctgccagcgcctttgtcggtctgccggatggcccggcattggttagcgtgacggtcactgacgtcgcaggcaatacgacgacggtcaataaaaccgtcattatggatgccgctccggctaatttgccaacgttggatatccataactttgctggcgacaacgtactggatggcgccgagcaaaaagtgaatcaaaccatcagcgggagtacgactcatatcgaagcgggtcaggttgtgaccattactttgaatgggaaaacctacaccgcgacggtggatggagtggggaactggagtactcaggtgcctgctgccgatttggcgttgctagccaatggaacaaccaccatcaatgctcaggttggcgatgtcagcggtaacctggcgtttaagagcgaaattattgacgttgatagcaccaagggggggctggctatcaacaccatcgctggtgataacttactgaatattcaggaagcgtccgcctctatcaatattaccggtacttctgccaacgtagccgtggggacgctgttacaggtgacgatcggcggggtgccttattttactacggttcaggccggcggcgtttggagcgtaaccatcccatcggttagcctgttcgtgttgcctgatggtagtactccggtcaccgtttccggggtcgatctaggggggaacccggtttccagtactctggacttaggcgtattcatacataatccacccaatatttcggtcgatccgctgtttatcgatgacaggctgaacgctgcagaagtagcggtcaatcagacgattaccggttctaccgggattaccggccctggccaaaccgtggctgtgacttttggcggtgtcacttatcagggtaatgtggctgtggatggtagctggagcataacgctgcccagtgcggcgttacaggctctggggcaaggtctgttgcctttcagtatcatcgttaaggatattgcgggtaacgaaggattctttgcgaccagtattctggtggataccgttgcgccaacgttagccgtgaacccggttgccgatgatggcattatcaatctggcggaagccactgcaacggtagtgatcagcggaaccagttcggaaattggggcgcagatcagcgcgacgctcaacggaaaaacctattttgcaacagtattgtctaacggtacctggcagttcagcgtgccgccggcagatctggtggggctggcagagggcaactattcgctatctgttatggtaaaagacggcgttggcaacacgacaacggtttcacagaatctgacgatcgatgccgatccggccaatttaccaacgctgaccatcaatccctttgcgggtaacaatattctggacggtgccgagcaacaggtcacgcaaagcatcagcggtgtcaccactggtattgaagcgggtaagagcgtgaccgtgactttaaacggtaaaagctataccgcaatcgtagccggtgacggcagttggagcacgcaggttccctccgcagatttggtgttactggcgaatggcagcgccactattactgctagcgtcagcgatgcagccggtaatccggcggtaggctcggaaactattacggtaaataaccagttagccgggctgagtatcaatccggtcgctggcgataacctgattaatgtggctgaggccgccagtaatattaccgtgagtggcgcctcgaccaatgtcaatgtcgggcaaattgtcactctgacgctcaatggcaaaacctataccgcgacgattggagcgggcggcgtatggagtgcgcaaataccagcggctgatttggctctgctggctgatggaacaatgaccctgactgccagcgctaccgatgcagggggtaacccggtttctggttcagtagatttgggtatttatatccacaacctgccggtcgttagcgtcggtcctctgtttggcgatggtgtggtgaatattgccgaagcggcggtaaatcaaaccattaccggtagcactggcattaacggcgcggggcagaaagtatccatcaccgttggcggcggaacctataccggaatcgtggcggcggatggtagctggagcgtcacgctgccaagtgcggcgctgcaaggattgaatcaaggcagtcaaccgctgatagtgacggtttccgatgccgccggtaataccaacagcctgagcacgccgattacggtagatacccaagctccgttactgactctggcaccgatcgctggcgacaacattattaacaaccctgaagttcaaggcgtaattacgctaaacgggactagctcagagctgggcgctaccgtttttgtcacgatcaatggacaaacctataccgcggtagttcagccgggtggtaactggagtttgtcattgccagcgggcgcgctgtctggcctgagcgatggtaactatgcgttcacggtgaaagtgacggacgcggcgggcaatccgaccacggtaacgcaaaatgtcgccgttgatgccgatccggctcatttaccaactctgagtattcatgtttttgcggggaataatattgttgatggtgctgagcagcaggccgcgcaaatcatcagcggtgtcagtaccggattagaagctggacgtatcgttaccattaccttgaatggcaaaacctataccgccgcggtcggcagtgacggcaactggaatacgcagattccggcggcagatttggctctgctaagtaacagcccgttcaccatgaccgccagcgccacggatattagcggcaacccagctaacggtagccaaagtattacggtagataacaccgctagcggtttgtccattagccagctaaccggtgataacctgattaatgtggatgaagctctggccggtgttacggttaatggtacttccagcaatgtgaacgtgggtcaaagcgtggttatcacgctgaatggcaaaatttataccgcgacggttcaggctaacggtagctggagcaccacgatcccgaccgttgatttagggttactggccgacggaaacattactttattcgccaccgctaccgatgctgcgggcaattctgttagcagcagcgccgatctgggcatctatctacacagcctgccaaacccacagatcaacacgccatttggtaatggcacattagatgcgagtgaggcggcggttactcaagctattaccggtacaaccggcgtcagtgggttggggcaaacggtgacagtgactatctctggcgtcgagtatcaggcgcaggttggtaccaatggtcagtgggcgctcaatctgccgagtagcgttttacaggggatcggccagggggcgcagaccattgatgtgactgctaccgatgccgccggtaacttcgctagccattcaatcccaattttcgtcgataccgtgccgccaacgctgactgtaggcaatatttccaccgataacgttgtgaatgcgttggaagcaacagccattataccgattagcggcacgacgtctgagctgggcgcgaccgttagcgttaccattaacggcatcacctataccggcttagccaatggtttaggcgtctggaccgtcaatattccggccaacatcttgaatcaattaccggatgggacttatccggtacgagttagcgtcgcggatgctgcgggcaatactaccgtggatacccagaatattaagctggtgactcaaggcgtgccggttccattcatgaatacgccgtttggcgacggatatttaaacgccgccgaagcgggaaccagccaaattctgactggcagcaccggcgtttccggtagtggtcaaagcgtcacggtaaacgtcggcggtacgcctcacttggtcagcgtggacagcaccgggaactggcagttggtgctgcaaagcagtgaacttttggcattgccaaacagtcacgtggcgattgtcgttaccgcgaccgattcatacggaaatagcgtggtgttgaacggatctgcggtggtagataaattggcaccgacgctgaatattgccccgattaccggcgataacataatcaacgccgcagaagaactggcacctttggccgtcacagggacgacagatgttagcgaagccggacgtacggtttccgtggtattgaacgggataacttacaccggtctggtgctgagtgacggtagctggagtgtggcgctgagcaattcggcggtgcaggcattggccgatggcaactataccttgaccgttagtgtgcaggatctggcgggtaaccaaacctcggtagatcgggtgattaccattgatgctaacccggctaatttaccgaccatcaccatcggcgcgatttccggtgataactatatcagtcgggctgagtcaacacaggacgtattgataaacggtgtaactgaacgcgtcgagcaaggtcgtcaggtcaccgttgtgttaaatgggaaaagctatttcggtacggtgcagccgaacggcagttggtcggtaacggtaccggccgcagacgctacgctgttgccggaagggccactcacggcgcgtgccaacgttagcgatttggccaataacccagcctcggatgttcatcaagtcacggtcattgcgtcgctggcggatcagccttctctgacggttggaaccgtggctggcaacgatattattgatttgcaggaaagtcactcgccgctgattatttcagggaccagccagcgggttccggctaatcaaacggtgaccgtgacgttaaacagtaaaacctataccgcgcaggttcaggccgacggtagctggcaggtcagcgtgccttctgccgatgtgaaaaacttgccgcagggcagtaataccattgaagccagcgtgaacgatgcggcgcagaacccggctaatgcgactcaccctgttagcgtggatactcaggcaccgctgctggtggtggacgtggataccagcattaacggcgtgctgaatctggcggacgcattgctgggcttggtggttcacggcacctgtgttggcgatacgggcctacaggtgaccgttaccgtcgcgggcaaaccttatcaggcgacggtgcagaatgacggcacctggactttaaccatcccaacggcggatttactgctgctgggtgatggttcgttggtcggcggaatgaatgtaagcgtcactgatgccgccggtaataaatccgaacaggtggtagatttgaccgtcgcggtgcatcaattaccgacgctaaccttcgacccgctgttcaccgatggcattctgaatcatgccgaagctgctgtaagcaccactttgaccggtgtcagcagtgggctggacgtggggacaccggtaaccttaacccttaatggtgtaggttatctgggcagcgtgacctcgttgggcgtgtggcaggtgaacgtcaatgcatcggtactaaccggtttggctgacggcacgctgcaagtttcggtttccgctacggatccgactaccggcaacccggccaacggttcggccagtctggatgtgctaacgcataatattccgaatgtcactttcccaaccttgccgtttggcgacggccttatcagtaaagcggattccgatttaacccagttattaaccggtcaaaccggcgctaccggtgctggacagacagtttccgtcaatattaacggtgtggactatctggctaatgtggcattgaatggtacctggacgctgtcagtgccgagtctgatcctcaccggtttgaccgacggttcacacactattaccgtcacggcaaccgaccgcgcgaaaaacgtgagcgtggaaagtgtagacttcacctcgattatcaacagcatgccagcaccgaccatcagttccgtcagttttggcaccgagctgaatgcgaccgaggcgctttctccagcgctattgaccggtactgtgggaacccccgggacttttggcaatgtgcagggtgtcacggtctttatcaacggttttggctataccgccacgctaccgaatccgcaggatggcacctggtctctcagcgtaccgtcagcaatattgaaggccttgccggacggttcatggccgattcaggtggtgaccaccgatgcggcgggtaatacaggttctgtgactggctcggtcgatgtactgattcacggtctgccaaatccgaccttcaatcttccgtttggcgatggcattttgacgtacgcggaaggcgcactgacgcaaaatctgaccggtaccaccggcgcgctcggggcggggcaaacggtgaccgtcgtcattgactcactggcggggttaacctttagcgttactgcgaatgcggacggcacctggtcgctgcctctgagttccagtgtgttgcagtctctggctggtggaaaccatacccttagcgtcaccgtcaccgaccgggcgggcaatgaagccactatcacgccgccgccgtttttatcgcagcagcaattgcctttgccaaccatcgatactctgtcgtttggcaccagcctgaacgcatcggaagccgctggtctgattattattcgcgggactaccggattgagcggtttgggccagaacgtttctctgaaaattgatattgctggtgtaagttaccccggcattgttgattcagtcggcggctggtcggtgaacattcctgccggtgcgttaggtggtttactcaacggttcccattctgtcaatgtcaccgcgaccgattcggtgggcaatagcggcagcatcagcacgccgttcgatagttatgttgtgttacctgttccaacgatcaatacgccaatctttggcgactatctgagcgccaacgaatcgaacgctggagtcacctttaccggaaactccggcactttaggtgcgggtcaaagcgtgaagttttacatcaatggctcagaatatacggcgaccgttaacccattaaccggattctggactgcgcctgttagttctcctgacttaaaactgttggtggatggcgtacaaaccatgaacgtagtggtgacggacgctggcggtaacgttgtgaatacgacccaagaattcacctccgttattcataatttgccgaccatcaccgttggagcttacagcttcggtagcgagctggactttagcgagagtcatactaatcagacaattagcggaacgaccacccacatcggtattggtcagcaaattaccgtgaatgtcggcagtctggggccgctaacggctaccgttggtgtgggcggaatctggtcactgacgttaacgccggttcaaatgacggcggcaagcttgggcgccagcccggtacatgtttctacatcttatacggatatggccggtaatccgtccacgggcaccgatctgccagactttaccctgagcctgacgccgccggcggttaacctaacgatcaacgcggttgctggcgataacgtcattaacgttgcggataatttacagggtttacctactgaccttattaccattagcggcaccgttactggtgcgaaccccttattacaaaccgttacggtattgattaacggcgtgccggtttccgtatcgttaccgattaccagtaatacctggaccactcaggtattggcctcgctgtttgccaacaacgcgacaaccaccgttgaagcaacgctggtgggcattggcagcccggcttcggccacggtatccgttatccgtgataccacggctccaacgctgacgctggctgattttgcgggtgacaacatattgaccatcgacgaatctcaaagcagcaagacaatcagtggcaccgcctcactggatgtggttgggcaggtggttaccgtcacgctgggagccaaaacctactttgcagaggtattggcgggtggcacttggagcgtgacggtgtcgcctaccgatctacaagcgctggcgcaggggaacgtcactctgtcagcctcggtgaaagacagtgtgggtaacgtgggtggcgcgagtgaaaccattgtggttgataccgtagcgccgcttattttgctggatgtcggtactaatctgttgaataacctcggcggattgttatcaggtacggcgaccggtgcggaaggtaaaactttgaccattacgctggggagcaatccggcaaacgtgatcaacgtagtggtgggatccgatggtaaatggacggccaatatcgatccctccaatctggttggtctgattaacggtccgctggtggcggatattaccgtgaccgatggcgtaggtaataccgcagatacccatgtgactcttagcgtggcgctcaacaatacgctggcgctggtggttgacccgctgtttaacggtggctacctgaacgccgccggaactttggtttcgcaggttatttccggcgttgccaccggagccggtttaggggccaaggtgaatctaaccctcggcggtgtgtcgctggaagcaacggtgggtagcaatggtaaatggagtctgacgattccgagtgcccagttaggtaacctcagcgacggtttggttcacttggatctggtgctgaccgatgctaacggtaacatcaccaataaagtggtggatctgaacgtactgagtcacttgctgccgagctttggaaccaccagtcaggtgtttggccccgatggcattctgagcgcggcggaagccttaaccactcagacgctgagcggtgtaattaacaacgttgcgccgggggcgttagtcacggtaaccgtaggcagtgccttgctgtacaccacggtcggcgctggcggtgcctggagcatcaatctattaccagcgttgctgggtggattacaggatggttcgttgcaaattggcgtttcggtgaaagatgtggccgggaatattgttaattcggcgctaaatctgaatgttttaactcacaacctgccaagcattaccctgaacccgatctttggcgatggaatcctgaatctggcggatgtatcgctggggcaggtcatcagcggtgtgaccaagaatctaccggctggatcgaccgtcaatattctgtttggcagtacgccacttagtgccatcgttggggcggacggtaccttctccgtaccggttccggcgggcttgctaagtgcgctgaccaacggcacggtgaatgtgaccgctaacgccagcgatgcggcgggcaacccgacatcgtcaaccggtgtgctgaatgtcagcgtcaccttaccgcaaattaccttgccagcactgtttggtgatggatccctgagtttggcggataccgcagtggctcagttgatatccggtacggtgagcggtgtagccgccggaactcaggttaaagtgagcctaggggggaaagatttcttcggcgttaccgcagccaacggcagcttcaacattactttgcaaccggccgatctgaaagcgctggcggacggtaatctgtctgccattgtctcggtgaccgatgcggcaggcaacaccggcaccgccaacggcgcgctgaatgtcattatcaacaacgtaccgaaactgatactcaacccaatcttcggcgatggtctgctcagtctggccgattccttactgccgcagattattagcgggcaggtggtcaacggtgtggttggctcgcaggttcaggtgacggtgggagccacgacgctgtatgcaacggtcggagccggtggaatttggagcctgcctgtgctgccaggaattctctccggattactggacggtacgcaaaacatcagcgtttctctcactgatagcgtcggtaacaccagtagcgccagcggctcggtaaaagtgcaaatccatgcactgccaaccctgacggtgcaaccgatctttggcgacggcgttctcagcgtggcggatctgttgacggcgcaaaccatcagcgggacgtcgaccaacgtggccgtgggaacgcagatcagtgtcacgctgaatggaaaaacctacctgactacggtggggaccggcggtggctggagcgtggcggtaccaccattggatctgaaagcgattctgaccgatggcagcatatcggttaacgcgagtctgacggatgcagtgggcaacccggcaacggtttccggcttgctgaatgttatttctaacgcgctgccgagcctgacgttagaccccatctttggcaacggtttgctgaacgcgacggaagcggcgctgactcaaactatcagcgggcaaaccaccaacgcggtgggttcaacggtgaatctgaccgtaggcgggctacatttcagtaccaccgtgggcgcgaacggcagttggagcatcgccataccgccgaccagtttgtcccagttgctggatggcactattggcgttagcgccaacctggtgaacgccgcgggtaatagcgcgggcgcggcagtcaatgtgacggtgggcattcacaacctgcctactttaagtctgggcaccttctttgggacggaccactacctgaacgccgccgaagcgttggccgcgcaggtaatctccggcaccagtactcatgcggcgggggggaccgttaccattaccttgggcggcgctacgctgacggctagcgtcaatctggatggcacctggagcgtgccaatcacgccatcggtgctgaccggattactggatggtactgccaacattggcgtgacactgaccgatgccgtgggcaatagcatcactgataactcctcctttaccgttaaaacccatgcgttaccgctgctggggattaacccggttaccagcctattggggatattgctaaatggtctggtggtttccggtagcagtaaaaacgtcagcccgcctgcgcaagtcagcgtgaccttgctgggccagacactacagggcgatattgctccagatggtaaatggagcgtgaaattcaccggttccattctgaatctactgaatctgggcaacctgctgactacgctggtcaacgtcgcggttactgatgaagccggcaaccataaagagttaaccgtcggcttgggcgtggggtctgtgctgccgctttctctgtcggcagaatcagaggctcaggccaccagctttatgctgaccagcgatactgacaccagccacaccaccacgtcagatcagcatcaaacggcggcgattaatggtgaaagtaccgataccggattacacactgcggctgcggcgaatacggtacaggcggaatccacgttggtcgaaccattggcgcagcaaatcgatagcatcctgatcacggatgtgaccgagggcggctacaccatcggcggcgttacgctgaatctagcggatggcaccgtgctaagcggtgagtcgctgaccggtagcgtcgagaacgatgagttcattctgaatactatggactttactcatatcgacggcggtttgggcaccgataccttgttgttgggcggtctgcatcaggtgctggatctcaccagtctggggctgaaagtcgaacatatcgaggttattgatttaggcaccagcgggactaacagcattgtgcttaatctacatgatgctttaaccatcactgataaaccgcaggacgacctgctgattaaaggtgcggaaggtagtcaggttacgttgagtcataccgaaggcggcgtctggagcagcgtgagccagcgtatcgttgatgggcaaacctttgacgtataccacaactcgtcattagacagcagcaatactctgggtgatgtactggtgcagcacggtttgcaggtgcatctggcctgaggctaagcggcggcgaggtgacggcatgtccctcgccgtatttttataataaatcagatggttaaacgctggattcatcagcgcgaaatacgaggttgggaagtatcggaatgggtgcctgggagcgcctttttcgcagggcgcaaagccagtcggcgtgactggctgatacatcagtacagcaacatgattctaataaagaatctcggcaacggagtcgtgtcggtgatgaaaaaaacacagcagcaccttctgccctggcgcattgtgggcaacttgttggcagtaggtattttttcaattggaattaatgccgctacgctggctgaaaatgtgccaccggcggcagtttttaactggcaggcggcacccagcgaggaagcccttgctgaactcagtctgcgggaagccattctgcgggcttttgcacgtaatccgcaaatcgctcaggcgtccgcgcaaattcgggtgggacagggggatttggacgtcgctgaaagtgcctggtatccgcaaatttctttacagggaacggcggggaaatcccatcaaactgattctgccggtagcctgaatagcaacgcttctgctggtgtgatgctcagtcagttgttgtatgacttcgggaaaaccggaggcagcattgatgaacagaaacaactctccgacgcctatcgctatgaattgtttaacacgatgaccgccgtggggttaagcactttacaggcctatttacaggtcaaacgctatcaggcgctcaccgccgcggccagagacaatctggcttctctagagcgagtcagagacattgcccaactgcgggcggatgccggtctcagctctcagtccgacgtattacaggccggaacccgcattgccggtatggtggcgacgctggagcaatatcgggcgcagcagcgctcggctcaggcgcagcttacggttcttaccggtgtggtttccgacaatctgccggatctgcctaaaacgctactcaatcagaaaattgctctaaacgcgattccttatgatgccagcagcgcggtgcggggggcggaatccaagcagcaggcggcaatggaacgggtacgacaaaatcaggcgcagcactggccgacgtttaaagtacaggcggggcgtactcgctatgaaaatgactcacgatcttactgggacgatcaggttcagttggcagtggaagcgcctctgtatcaagggggcgcggtcagcgcacgagtacgttctgccgaaggagccagagctgctgcgcaggctgaagtggaaaaagccaagctagatgtgaaccaacgtgcctcaaccgcttatgccgacatgattggggctcagcagcgccagctcgccggcgagcagcagttacaaagcgcgcgtcatacccgcgaggtttatcaggatgaatataagctcagcaagcgcagtctgaacgatttgctcagcgtggaacaggatgtattgcaggccgattcaatgcgtctgatggcgctgtatgacggctgggatgccaccgcgcgttatgccgctgcggtagataatctggtcgatatgttaggaattgatcgtgtggcccagagcggtgaaaaactccccgctctctgataaccgccccttacgcgattgaggtaaggatgaggtgtttaattgaccgtttctgatgaggcgacaggggtaacatgacagtacaatcaacgccaacggaggtttggatcactgcaatggcaagggttgccagccgctatggtcaaccggccgatatccatttcctcggccagcaaatgcgctggtatgaacaactcagctggccacgccagttggagcgactcagtagtttgctgggattacaggtaacgctggttccgatcagcaaagtccattggcgcaatgaattaatgccggtgctgctagagctggaaccgggcagcgtagcggtagtcgaaggcatcactgaagcaggcctcgccaattattggttgagcgacggcggcgatttggtgcgagaagcggagctgccagagctgctggcgcgcagtccgggcatggccattatggttggcattgccgcccgaggccgtgaccagcgcattgatgaatttgtgcaaccttaccgcaaacattggttttggcgacattttcgcggtgccggacgcaaaattgccgaaatttcgctggcgtcagtcataggtaacgtactggcgctggggggaattctcttctccatgcaggtctacgaccgggtgattccagcacagtcttattcgacgctgtgggtgctgttcattggcgtactgctggcggcggcgatggagtatgtcattcgactgacccgcacgcaggtttcggatctgatggggaaaagcatcgatctgaaagtgtcctccatgctgtttgtgcgtgcgatggcgattaagaacgaagcgcgtccgaaatctaccggttcttttatctcacaactgcgtgaaatcgatcaggtacgagagctgctgacgtccactaccgtgggcgcggcggcggatatgccttttgtgctgttgtttttagcgataatggcgtttatcggcggcccgttggtgattattccgctgctggcgatcccgctgattgtgattcccggtttactgattcaatggccgatggccaagctggcgaaagaagggatgcgcgaaggcgcattgcgtaacgccattttagtcgaaactatcgaaggcatcgaagacataaaagcgttgcaggctgagccgtatttccagcgtcaatgggaacaaactcatgaagtcagcgctgcagtagggatgaaacagcgtctgtggggcgcccgcctgaccggttgggcatcaacggtacagcagctaacctacgccggtatgctggtattcggtacttatctggttttggccggagatatcaccacaggtacgctggtcgctagcagcctgctttcctcgcgaactattgcgccgttgatgcaattaaccatggtgttttcccgttggcaacatgccaaaagtgccatgaccggtctggacgaattgctgaaaaaaccgctggatcggccagaagatggcgaactggcgcattgtccggtactcaacggccactatttgctgcgcaacgtgcaatacacctacgatgcggagaaagggcaaaatgttattggtatcggctcgctggaaatcaaacccggagagaaagtggcgattcttggcaaagtcggtgcggggaaaaccactttactgaagctattagccggtcaggctagcgccagcaaaggcaaagttattattgatggcgtggatatgcagtgcattgaacccgccgacttgcgtcgccagttgggctttctctcgcaggattcccgtctgttcttcggctccttgcgccaaaacctgatgcttggtcatccgcacgctactgagcaggaaatgcttcaggcgctgcgtatcagcggtgcgctcagtttggtacagcaggacgccgccagcttggatcgcattattaatgaagggggacgcggtttgtccggcggccagcgccaaatggtattgcttagccgaatgatattgcgtaacccgcaggtagttctgatggatgagcctaccgcttctatggatgaacagctagaagactatgttattcgccaaatgaatgcgtggctcaccgggcgcaccttagtgctagtgactcatcggccagcgctgctgaaattggttgaccgcattatcgtgatggaggggggacgggtgattgccgacggcccgcgcgaccagattctcaatgcggtatccgcggcagaaaaatccagacagggtgcagcgtaaggggaattagcatggcaaatttaggcttgcagcaagaaatggcccaacaggaacggcggatttccgccattatctggtttacgctggtggggatggtggtgatgtttgtctgggcatattttgccattctggatgaagtgacggtgggggtagggaaggtcacgccctccagccgtgcgcagctgattgaaagtctggacggcggtattatcgatgagctgttggtgcatgaaggtgccattgtcagtaagcaacaggtgctggctcgtctcgatcccacgcgttttcaatccaattatggcgaagctgctgcgcgggtgacggctttgcgtgcttcttcagagcgtttacgggcggagctgacaggagagaaactggttttcagcgccaaaaccttaaaagaaccggctttagcagcgcgagaaatgcagctttacctctcacggcgacaaaatatgatggaaactgtcagcaaccttcagcagtctctcaaactggttcagcaagagctgcaaatgacggagcctctggttgcgaaaggtgcggccagccaggttgaggtgatccgactacggcggcaagtgagtgagatccgcggcaaaatcgatgatgctcgcaaccaatatgcggtcagggcgcgtgaagagcaggtgaaaaacaatgccgatctggatgcccagcttcaggtggttgccggcaaagaagatcagctgacgcgcaccaccttgatatcgccggtgcgcggcatagtaaaagatattcaggtttccactgtgggcggcgtgttacaacccggcggtaagctgatggaaatcgttcctatagaagaacagctcttaattgaaacgcgaatcaacccgcgtgatatcgcctatattcgccccggattaccggccacggtaaaaattactgcttacgattcatcaatttatggaaatcttaccggagaggtagagtctgtatcgccagacacattacaggacgaagtgcggcgcgatcagttttactatcgcgtgtatgtacgcaccgacagggcagagttaaccaataaagccggtaaagctttcccgatattaccaggaatggttgctagcgtagaaataaaaaccgggcaaaaatcggtgatggattacttgataaaaccgcttaataaagtgaaggagtctctgcgggaacgctaattatttactgagaatcctcagtctacgctcaaaataaacccccaaaccctttcttgttgaagggttttatttcgtttgttaggcggggaattcactcggtaatctgagctttacgtgctgaaataaattaatgaaactatacatctcaataattatcacgtgtaactatttagcaaacagcagaaacaaatatcctcaatctctccttaattgtgataaataaaaaaagccgatcaagagatcggccgttaaataaacgtatttatagagatgctttaatccgaaatgtgggtaatagcaaaaataatgatgatagcggaattattatatcgtgatggcttacggtgtttcttatcaattagtgctaaaaatgaactccagttaattctttgattttaatgtattttttattttatcttgatttttggtgctataaataatgtattttatagttctgtgaaagttcgctcgtatttacattatgaaacccttagttgctgtattgaaacatgttcggctatttagtagcattttctgtatagattaatattattcttattaccacaatagcaatacccaattgggataaattgctcgtcagagcagtggcgataataagacataattaccgaggataataacgatgaaacttcgagttctttctctgctggttccagcattattagtagcgggtaccgcaggcgcagctgaaatttacaacaaagacggtaataaactggatctgtacggaaaaattgatggccttcattatttttctgataacaacggtgtggatggcgatcagtcttacatgcgttttggcctgaaaggcgaaacccaaattagcgatcaactgactggttacggccagtgggaatatcaggcaaacctgaacaaagctgaaagtgaagataacaaaaacttcactcgtgtcggctttgccggtttgaagttcgctgacttcggttcactggattatggccgtaactacggcgtggtttatgacgtcacttcctggactgacgtactgccagaattcggtggcgacacttacggcccggataacttcctgtctcagcgtggcaacggcatcctaacctaccgtaacaacaatttcttcggtttggttgatggcctgaacttcgctatgcagtatcaaggcaaaaacggcagtggcaccgaaaccaataatggccgtgatgttcagggtcaaaatggcgacggctacggtatgtccgtgtcctacgatctgggctggggcgtaagcgcatctgcggcgttcgctagttcgaaacggactgacgaccagaacgctccaggtatctatggtcacggcgaccgtgcggatgcctataccggtggcctgaaatatgacgcgaataacgtttatctggcggcaaactacacccaaacttacaacttgactcgttttggtgatttcaaaaacaccagcgctgacgcggcttacggcttcgctaacaaagcgcaaaacattgagttagtggctcagtatcaatttgattttggtctgcgtccttccttggcttacctgcaatccaaaggtaaagacatgggtaactacggcgaccaggatttggttaagtatgttgacgtcggcgcgacctacttcttcaacaaaaacatgtctacctacgttgattacaaaatcaacctgttggatgacactgccttcaccaaaaatgccggtatcaacactgatgatgtcgtcgcggttggtttggtttaccagttctaatcccgatggttctgggcaagatctgatgcagaacgcggccaaatggccgcgttttttacatacgcgctcggtgagtcggattggttgaggacatgcgttggggctgtaggcgaaaatttggggataaacgggttcttcagcgcatttttatcgttcccgctaagatttagtccggttttgaacaagatggaataagtaaaagagtgaagcgctgcaacagcaacgggttcagtcacaaaaacagaattaattttgttcaatctgactttttttaatcagattcagaacgaagtttgaccaaacgaattaaattcccattttttttaaatgaaacactagacatatcatcgcgctaagatgataatgccgcccattggaaggatggctgagtggtttaaggcagcggtcttgaaaaccgtcgactgtaacaggtcctagagttcgaatctctatccttccgccaaattcgccggcatagctcagttggtagagcaactgacttgtaatcagtaggtcccgagttcgactcttggtgccggcaccagcagtaagaaaaaagacatcttcggatgtcttttttttcgcccaaaattcacctcctgacctttgccaaccttcggctctatcgagctaatctcggaaagtctttatactgagccatcgcctatcgtgggcattatgcggaatcacctatgtttcccccgttaaagactcagcgttgtcgattgcgaaaaattcgccctacggatattaaacaggtttttgccgcactgtctgatccggcggtaattacccactacggcgtggcttattcctctctggccgccacgcagattcagatggattggtttagtaatatctatgcgcagcagagcggtatctggtggggcatttgcattgccggaaacgatcgggaaattatcggagcctgcgggtttaatcaatggaatcacgacgttcgctcgctggaactgggctattggctactgccagaatactgggggcagggattgactcgcgagtgcgtcaatatcatttccagccatgcctttacagaaatggggattcatcgtattgaagccgtggtcgagccggaaaaccgcgccagttggcgactattggaaaaatgtggctttcatcatgaaggcacgcggcgggagtgcgaaatcaaagatggcaggtttattagcctgaaaatttacagtcgcctggcaaccgatgaatatccggtaggattgccctgagaaatgaaacgaaagcattgctcgttgttgaacgctgtataaagaaactaaacataacaaattaatcataaaaaactgatcataagaaactgaagccgcgagcagccgttttagcgatgctgtcctcgcagatatgaagcagtccgatcattgatggatttttgctaatgagtaaaaagggcatcggtgagatgcccttatgcctacgagttattgatccgataatgattggatcgtgattttagcgaccattgctggctaaatcggctaccagctggttcacaccatcactcatattggtgaatttggtcagctgtgtgcgcgttaccacgacgaaaacaccgatgtttttttcaggaatcatcgccatataggtaataaaaccgccgccgccgccggttttttgaataattcccggcaagccatttctcggagccatatacacccagcctaaacccaaggcatcagcctgacccggtacgtccattccttttaatgaaaccagctcatgccgctggaaatacatcttttgttcacgtttcgccgtggcttttcttggactgttttgcgtagacaggaactgctgcatccagcgttgcatatcttctggagtggagtaaattccgccgctgcctgccgccgccgtagtattacgacaggcacttccaccaacgccaaccatcagtcgatcgcattgttcagccgtcggcgtcagggtggtatttttcatacccagcgggccggtgattttttctcgcagcagcgtggtgtaaggttttccagccgctttagaaagcgcatccgccagcaggtcataggccagatttgaataagccgcccggacacccggcggtaccgtaactttggcggttttcagccattgccaacggtcgctcttagtcggccaggtaaataccggccttttttgcgggccaccgggctgttcacgaggaaatccactggtgtggctagctaagctcaacaaggtgaccggctgtttagcgttatagccggggacataggcgcctttgggggcatatttttttagcggatcggtgagcttcagtttcccttcttcagccagtttcaccatgatttcgctagtcattaattttgtaatagaagcaatacggatcagtgagtcctgacgtgggcggatgttattgcccggtcgggtttcgccaaaactacgattgaccacctgattgttatctatcaccaccagcgccattcccattgcgccactgttataaaaaatatgctcggcgtgttgatccacaacttgtgccgttaaacgttccgtttgtgcataactgtgtaccggcagagtgaacagagccgccaccagtaaggaagtagagaaagctttcaactgtttttatccattttcaaaagcagaagggaaattcaccctgctatattagtcagttattgtcagaagaaaatgaagaaaggtgcagtagcgcaatatatttatcgtggttgaatatatagaaagtcggcaatggccatgtcacccgagctttttttactgcaaatcaacacaacatgttgatattaaataaataaaattttcaaggcctgtattcagttctgaaaacggtatcggattttattcgcaccatgagcgcgctggtgtttacccgcagaatttacttcaacgaagggaagggcgttatcaaggaggaaactttgtactacagccggttaggccggaagaatataccgtattgctgaatgaccatggttcccgcctgtggtggcatcaatggccgcacctgatttcgacaagaggccggtatggctaacgggttcgtaagcccctcattctttaggatgaaagtcaccgcccttaatcagcgacggttatccttgtgtcattggctttccgctatcggtttaattaatattgcggccgtttctttaacacccaacggattattcccccagcattgctcatattgccaaccggtaagctcttcagccaccgcgcgagcgtggggaggaatatcggctatagcgccaccggctttgatgcgggcaatctcttctaacaagatagcgtggttttttcctgtctaatttcatttgcgtggtataaaaaatggcgaccaacgctagcgcaatcactccaacagcaaataccccaacaatggcctgaaccgcgatttctggttgttctgattggccggaaacaaagccgaaactgctgagcctccagcccatggaaaacacaatcaccgaacgcaccatcttgccggcaaaagtcatggcaccggcgtaaatcccctcgcggcggcgtccggtcagcactgcatctacgtcggctaaaaaggtataaaccgtccacggaatgtagtaaatgccaccggtactcagggcgaatacggcggtaatggcgaacaatacaaccaccgtggtggtttcggaccaaccggtaaaatacagcgcggcgtaggcgattacgctaacaatcacaacccgtaatgcgatacggaaagggcgggcaaagccgattttgacgcaaacaccgataaatatggcggttgatatcagttgcataatcgaactgaaactgttgagttgagaaaccagtgtggcatcttgccccagaccaaaaataataaagtaggtaaatgctgaagcgaataaccattctgcaccgaagccaaacagatacattcctaaatgcttgcggaaaatgcgcagatggacagtggacgccatatcaacgcagagttttttcagcgcttgtcccaagctattggtggtttctctaagaacttcactggccggtcgttcccaggaagaagaatacagcgggatcattgcactacacataatcaaaccgtaggcgataccggtataaagaaacggcgttggcgaatctttcccgtagatagcaataaactggccggggataaaagccgacagaaagttggccactttgccaaaaattgctttagaaccagtgagtttggatcgtttggcaaaatctgtcgtcatttcggtagccagcgtttcataaggcaccataattgaggtatagataagctcgaacagcgcgtaggtcagcaggtaataccagaaaccaaaaccgctcatccacaataagggataaaccaatactagcgggataccgagcaggataaaaaagcgacggcggccaaatagacgacccagacgagtgttatagaaattatccgtgatgtagcccataactgggttactaatggcatccagaatgctggcgatggagaaaatcgtcgctgcttcgaccaccgttaacccacagaatatgctatagaaatacatcaaccaagcgccgcttatagccaatgcgccgctgcctaagaggttggcactgccgtaagccaaggtatgccgcgctgaaatttgtctgttcattcttatcgtcgaaaaaaataaaacaatattttatttatagtgttttattgtttcttttatatgagtttactttggtcaaaaatgagtcaaggatcacgaaacagtgttttgagtttgaaagagacgagtaacctgataaaagttgatataaatcaacctaggctataggcatgaaaaacatgggtgacatcatatcgatgtgcccaacgcggcgttagaaaagtacaggctaatgagtgatggctattttttcgccgcaatacggtgatgaacgcggtaattttgagaaattggatcgtgatttttagtcaggttccaattagccaaccgatggttggagcgggtagaaataacgttagctgacgctgcctatgaggctgtaagccacatttgaggaaagacatggccagaaaaaatccgtattacgatgccagcaagccgcatcacaccgaattcgggtttcagaatctggagccggtggcccatcattcgcgggatctcaaacgttggcgcgaagaacggaaacgtcaatcattgcctaagccgccgtcacaggggtatccggcgtttattgcccaatggtggcaacaggccgagtttagtggtgaagatgatgctgcgtggtggttaggtcatgcctgtgtcttattgcgtatcggtgggcggacagtgctgtttgatccagtgctgtcatcgagagcctccccactgcatttctatggcccacatcgtaaaacgccagtcccgaccaaggttgaaggattaccgaatattgatgtgattgtaatttcgcataatcattacgatcatctggatgccagaactgtcgcccagttattaagacattctccgcaggtcagttttatggttcctctaggtttaaaaccttggttgctgaatcacggtgccaaaattattcatgaattggattggtgggaaagttatcaaatcgccgataccgagtttcattgtgttccggctcgccactggagtatgcgcacgccttgggatcgcaaccattcgttatggtctggctgggtagtgaaacagcaggggattaatttttacttttctggtgataccggctattgcccgcagttggttgaaattggtgaacggcttggtccttttaactatgcggctttaccgattggagcctatgcgccgagatggtttatgctggcgcagcatatggatccgcagcagtcggttcagctttaccagcaattaaacgaacctgttaccattccaattcactggggcgtttttgagttagccgacgaatccttagatgaaccgccggaacagttagcgttggcgctggctgccgctgattgtgataaagaccactttaaaccgattaaaattggcggccgtatcccgttaatagcctaactcattgaggtcatagccaatggcttagcgcgctgtggttccttcagataaccagggtgaagcagtactccagaaaattacattcgcacctaaatagttctctgcataatcggtaaactcagctttggtaaagggtttgccggttttagcattggtgtaggtgagggtgggttcctggacggccattccaaccagactaagcttgcctttgtattgattaaagaacggataggcatttttcatctgcgcttttttatttggtacgatatctggcccgcccagccccaccttgtttttcgcagcgaattcaaacaggcgtgacatgtattgatgatcattattccattcacaaggccaaaaattgacgtattgcaccacatgagatttagagaagactttacgggcaaaggccatattctccatctctgcggcaaagtatttatcgcagctaaagccggatttatcccttttaatatcggggtcaatggcggtttctggcagattgacgccaaatacccggccgtcgaattttgtagctaatgccgccagtagtttttgatagcgttgttgtaccgccggattccactgctgggttacccaacctgaacccgcaggcttattttcgccgggattatcatattgcggtacgataccgccgttatagcgcggatctttcattagataggcaggaacgtttttagcttgaggctcaaagaaacgatcctgaatttgaataaaaagtttcttatttaaactattaaggtaggcaaggtcacgctcgatctgtgaaaaatcatactgatctttgtcggtttctagcgccttccaattatagacaatttgtactccgccaatatcaggccgctgaatcagagaggaaatagtcgttaaatcgtctgaaccggtatacagaaagttttgcggtacagcgccagtggcagcataggaaaataacgttattagcagaccggcgtgtaataaaatatttcctgctagtttcatattcttccttaaataagttgggctaattatttttcgcgagttaacggcgataacattcgcagcaatacattcgcagtaataaaggtaacgcaattaaacacagagtaattaaacgtaaagtaataaaactggctgatagcgtacacggctaggtaccggtattcagccctcgtagcgctcgaatagccttaggctcaagatagactactgttctatgactgctaataatacggcttacaatgacgttgcgtggcccggtttgccacgcctcgctgcggtagaactgtgcctgtttgcgctcaagctctgcgagattggcgtatgagcgaatcagataataactgtcttccagttctacgcctttgccataagccactacgtccataccggctttctgatgcagtggaatactaatatcctgcataacccgatggaatatattgccgctatcgggctgtaatttatatagaagaatttcgaccgttcgatacatgtctatctccggatagatgcagatcgacggagattagctttccatagtcagccattcgtccgcttcttcaaacatctcttcgatcaatctgttcagagcagatttttccaacttggtcacgcccgatacgttgagaccgttggcctgcatggccttaacgtggacgtcagcctctggatgaatccgatgcacacgtttggtcaactcttctttgatcaaatcagtggcgttggtcagaccgccgacgtttcttttgtcataaatcaattcaatacgcatatcttcccctaaaaatgtcaggataacccattcaaaaacaactgggttaatatacagtattggcgcgttgacaccaagccggttttttctgctgccaggaatttaggacagtatgtaagactgaacctagcgatatgtcagggtaaaactcgctacgctattggccgcccccggcgtgattttgaccccggtttggtaataacgagcagtcatcgggatttcattagctccaaccgtggtgctatcgagtaaattcgtgggcgcgcccagcggaaggggattgccatcatacaggatctgaattcccagaccgctagccacctgttctcctgtattgccgtttaacggcaatacattgtcgctactgccggaagtccccagagtgagtgaaactttggtgtcaacttggcagtccagcccgatggtaaatgggacggagcggccatagctgccggggccggagaaagaatgactattgacggtacccataggaacctgaatggacggcgtggtggtgttacagccgttgacctgaatatctaccgctgggaaggatatttgacctaaacccttgccatttgtgatacccagacaggtgtaactcacactgaccgggttatatgccggcaacgtgccagaggttatatcggcatatttcaccaggaaatattccagattggtgcgcatcaaatagccttcataggtgtactgtggtgcgtaaacatctagcaatccgtctctaccgtcggttctgtacgcgatgccgacgccttcctttgaagttttatacactggcattgaatcgtaatagatgcccgtccatttagtggatgttcgtggttgaagaacgaagttccccggtgcgccgaacgagttgttttttactacttttaccgcatagctataaacgccagaggcaagtaatgagcctatcggggcattcattggaacggtaacgggtccctggctggtactggggtagatatcccacaccgcccagcattcagcttcggcataacttttgggtgtgaaaaccaacgtcagcagaagaatgagataaatccctttttgtcttatggacaacattttcaatctattcagcataaatttctcctgctccatgagagagtttccctcattaagataacgggggaatagtggttagcgttttcttttccacttaaccttccccgtcatctctccattgtggccaataaatattataaatttcaatcaattagttttttttggccggattttagccagcttatccagtcgcgtatattccggatttaaatatcaataatggcggcttatttttcgctgcggctgaaactctggatcgggctgatgagtaatacggttacgaatatctcttctgaatatttcgatagtccacatccacaccacgtgaccgaacgtttcggataaaagctcttcaaaaggcaggtgccacagcggtgggccccagccgaaaagtggtaacagcacgccgtggaaacctaaagtgaccagaatggcaaaagccgcgccctgccagagtttgatcgtcgggaatatttcagccactaagcaatagaacagggcaaacaagatggaaaatagctgatgaacgcccgccacgccccagttaataatatggcctgaatattgatagatcatatcgttgaccttgaaacccaaatcttgcagcatctccgccggcggaatggctctgtccgctgtccttgggggaaaagggatctccgctccccatttgacgaaactggcaatattcccgcctaaaaaaccggcccatagggcggcgctatagttcctgtattttttctgtgtagtagcaaaacgtaattccataaatattccttgtttaaaacggccaatacttcggtttttaggctgaatattttattaaattatataatttaataagttagagcctgttgaatcacccttatttagagaaaagcgaagatcgccggatgagaaatagtgttccgagtgatgaaaaaatcgcttttatctatcatcttttatctatcatgctgtgttgctcctgtcctcaatttcccgaaatgacaatatctatctgaaaaatatgaactttatatcagtaattctctcgtagtgattgaccaatcatctgctacctgtaattcagcgtaatattggccgtgctgctggctcgacctgcgttgataaactcttctttctggtaataacgggcggacagtagaatctgcgcgcagcctgtttccgagaatgaaataccgctaaacaggtcccctaacgtgataggttgcccgcggtataacagttgaatgcctattccttgcgccgtaccattgccgctatctaatgccagcaggtcaggcgaaccttcaatgccagcgccgccgatcgctattttgattttgtccgtggcggtacagttgagtgggattgaaaacgccacttcatttgcagtgctattcaggccggaaaaggcgcttatttttacccgttccaaaggaatatgtagctttgccttctgaacgccacaggctcgtactcgaactgaagccccgtacatcaacccattccagtcgtaaaggccgtttcccccgctggcgaagcaggaataaccgatgttgaataatttatggcgtaatagctttccccccgaaattggcccgtacttaaccaggtaataatcaagatttgaggatatggcatcgcccctcaggtttttactgttatgggttatttgccgcgtttcggcgccaccttttgttggcgtcacggtataggccacgccaacgccctccagattggttttaaatacactgattccgcgatatttaagcccggtaaactgagttagcggattgatagtgataacaaaatctcccgctgaacccgcatacgaattatccataatacgcgccgcaatatgggtttgcccttgagccagcaggctgcctatgggcgcacttttatccacgtataccggtttgggaaaaaccagaatcggggcgtgagtgaggaaagaacgacatccggccgctccctcccgcatttcccacatcatcaacatgaaaaataaggtgatatagcctaaatagcgcggtaatctccgagccctcatccttgctccttgcctcaaaatggcggccgcatacgtttgaccgtcctttacttagctatgtcattaccgctttacagctggcctgtagggtcagtaccgatgaaccgttatcgtcagaagtttctggtaggatgtagtccgccacgcacttctgcggtgtgccgttgctgtcccattccaccagtaaacttcccttatcagggataccgctcaaataaacctccgcattattggcgacaattccgctattgattgataggtcgtcattatgttttagcgatgcgttggcgccgaacggaatggtttttccatcgaagttcagtttgattaacgctcgttttcccacgcgggttttgaaatcagccagtacaacggcacctttggtcggcaccacggttttgacactggtatcaatatcaatgttttcgcccaaggtttgggtgtccagcgcaattcggtttttacgataagtactgacataaggaacgaccgcgtaccctcgccagtcggtatagacgccgctgctattttgcaccttcactccgctggctcccggcgctttaaccaatgccagtgtctcaccttgggattgcgagaaagtgacaccgaatggatgcgcaaccacgcctccgcgcaggttatagttcaggcggcgggaatcgttgtcatagctgtaaccagagccgatttcgccataggtgccgcgatagttggcgttaaggttgccgctggcaccgttgccctgattagtataattctgctgaatgttgtaattcaggttgttgtccgccagcgcggtgccgctcaaaccgagctgctgggtggtacgcccggatttgctgtggttgacgttgtaggtagaccagctgttagctaaccaacgatcgagaggaacctgcacgctgaaagctaacacactgtcgctattacctacgcccggtgtctgggtgtggctatatgacagactgtagttaatgcctctatgattcaggttataaccggtgctgatattgcgttcataaccagattgccaccaataatcctgctgatacccagagatataaagatgaccgtatccgcccatagactgattaaggttgagctgtattttgctgcgtttattgtagtttgggcgccagccgttgacattttcccgatattcattagtttcacttaaggtataaaaaccttcagtggaatagcgataacccgccaaagtaaaattggtattagtggtactaatatctttggaatactggaaccgataagactgcccctgggttttttttcctcctctatgagaagtattagcctgagtggcatcgagagatatcgatcctatatcgccgaacccatgaccgactcctagcacgccggacgtgtatttctctgcagccaatactcccccgtacaaagtggtgtctgcgggcaacccgtaaatcagggttgactgggcaaagttcggcgttgccgcaaaaggggtggtagtgcgatatttccctgccgtaacggcatatttcaactggccttcgcgctgcataataggcacggcggagaaaggctgcacaaagctacgctcagtaccatccgcttcccgaatagtgacgtccaacccaccgctggatgaggttgggtagaggtcggtaatggcaaaacttccgggaggaacataggtttggtagatgatatagccgttttgtcgaatgatgacctgagcgttactctgtgcgataccgcggactaccggggcaaaaccgcggcggctatctggcagcatattggtatcggaggctaactggactccgcgaaattgaacgctatcaaatacttcgccgggcgtcgaactgtcacccagggtcagtgcgcctttcagcggctgaatatcccgttgtacgtaggtattaatgttcttccactcacgcccactcttattattatcggtgtaggtggagtagttacgtaaccgccaggcacctaaattggctccgctacgcaagttaagataatagttactgttagtcccttcactacgcgaatcccaggtgttagaaccggtaaagctgtagttaaccagcgcggcgggaatcccctgattccataactttgggtcaatggcatcgcgcgcttcattattaagcgccgcttgtggaatgctgatatccaaccgctggcggttaaagttgaaacgagtgaacgcttcgggaatatgttgatctaaattgctgaatgcttgagtcggcggtaacgttttaagtgatgaaaaagcctcaatattgacacccatcgcagccaattcttttgtggttaattccggcagaagcttgccgttacgatccacaaaggtcaccgagcgttcatcgactttgctgtcgtttaggtaaatatccacccgataggttccgggaatttgcgaaccggtggtagaaaactgacccagactgacgttctgaggtgtaccttctttcaattcaagcgcataaggattgaaatagtctgctgccgaaacgttgactatcggtgcagcagacgcgacagagactagagtccaaaggatatgccgggtgagtcccgctggcttgcaatgtttttccataacaaaattcctccatttggggccgaaaaaagcgtacggataccccttacccggtatggatgggcaagatgtcatttcagtcaggattaggttttgcgaattagagagaaacggtctctttggctgaaatgccaccgtaatcggtaatcgcctgccagcttatctgccctgatgcgcctgaaggtaacggccagctgcggctgcttttcggagcgatcatatccgcttcttttatctctgatttcccaacgttaagttcatagaacgaaacgtaatagggcgtgggattaaccacttccaattgattacctttacgcttgaactggagagatttataggcatttgcagcctgatttctcagcagcccggttggacgataaaataatttgatacgcgattgaaccgtgatttgtagctgattctcatcggttttatgcgttgccgggatagatttaacgctgagccagaataccgactcgcgatcttgcggtaagttaccgccggcccgaacaatacgcagcgtattctcttgctcggcatccaatcgaaacaatggtggagtgacgataaagggaatcttagtcgtgtttgatgcatccagattatcgatccaggattgaatcaggtaaggccgatccttttccgggttggttactgataaagaagcctcttttttactgccatcgtatatgacgcgtgtgctacctataacaatcccagcctgagcctgataggtaatcgttagcaggcaacatacagaaataaaagaacgtatccatgacataccagaattcctcataactaactgcccagcagattctctgccggtaaagatatttttcatgtaaaaataagcatccttgcctcgcccttgaaacatgggtgatccttttgtttgtattttttaaatttaattaaccctaactaaagcagcgctattagttataggaaatactaaactgagtgactgcattagctgggccggtcgtgacagtggcattggttgacatatatttggcaatgtagctaaagacgggattcacacctttcgtcacggctttttgcgcggaaggagccgtcatgggaatcagagttgtaccgtctgcttcataaattgcgatacccaacccagtagctacgccagtttcagtggtcaacgcgagcagattggtattattttctgcaaaaggaccatcaaactttaccaaggcctttgtcactgaatctggacaagaggtcagggtgatatcgaattttgccggcatggcagtggcaccgaccgctgggaaagccttggcgctgacattacctaaagcaaccgtctggctggcgctcgctgtgctaacggtacaagcttcagcaataactgtaccggtgaaattgatggtgccgtctgctgcatttgcagcatgagagaaagaagcaaatgctgcgctagcgagtaaaatagttgcgcgtaatttagtgttcataaaggtctctccatttaaataaatcaccctaatttacatcctaatttaggggcattttctcagcatttaatctcagtgaaataataggagccttgtctacttaatagtatttgtaataaaaatactattaattttttttgactacctattctccgacttacgttgatatgactctgcgtagggtagtttccattttctcacgacgtaacatttttaacaatcacgtcacatttgcagtgtcatattaacggagcataggtttacacaaaagatcaaaatgtaaaaactttatatcttttttaagtaaaattaagaataaaaaactgtttttatcaaataacgctgttccaatgaggtctcacacagttacattttgaaatattgaggtgattattctgacttaattcaaataagcattatttattaacgaattattattaaatatttgtcattccgattgaatgaatttatggcgaatatttagacaccatgcaaaaaaagtcttaatggattttagtggatttaatgaacttaaaagaataattccccgtgcagagatctccgttctgattaattgatttcgtatcttcgcgatataaaaacggagaaacttgagaataagatgtgatctcaattctattttccatagcacgcttttctgcctaaaactattaaataaatcatcttgttgatttaatagataggagtgggttgttagtcatatattttgaatattcttcaaaataccgaacttaacaggaaaaaaaatgagtatgggcggatgagttaatccaatgtcattcgtaaacagagttatgtgattttgagtttacaggatgtttgtctcaatgagagtcgttttcattgcaaccgattatttacacaaagagagtatggttatcgttcgctttttctaagattaatcttagatatctatataaaacaatcgccatatttaattaattcaattagttacattaatgagcgttaattcaaaggttacagggagggcaatccagcccaatcagaagaatcggccataatattgctgcataatcagcacgattgcccagataatttgattggataaatatgcactacgcaaaatgacctcaatagcttgccatcttaaagaaaccggtttcggtaatttcaatcgtcagcgactcactattgaatagaagtcgtttaccagtgcctgaatcggaggctgagtgcatcatttgactgaaatgtaaggttacggatgccgaatcgctcgcagtagcatgttcttttcatcacacaaataaaccttgggtaaaatgcgttttttttatacatttctgctctgttgaattgcttctggtagaagtgaggaagtcggcgcgagattctgtccgatacgggtgcaaaccctcagatgagggagtgttagcttaaaaattgttctacgtaggcttaacgctggcgagaggttgtgaaaaaatcagcaaaccaatcatcaaaaagttatttggctaagtctcctgtagaggctgaaaagcgcgtaggcgagttttggcaaaatctgcgtgtaacttctgccaatcttctcccagattcttcgtaacgtcaccggtgataaaagtgcttacatatcaatactttaatttattttttcgactttatcttgtcgcgtttatctaaggtttaataatttatgttaagagttggcaaattttttagcactaaattctgctaaatatagattcatagtttatttgactggcatgttaagtaacggctaatcggggtgtgtttagtagccaccgagagggcttattcactacgggaacatttaggagccatagagatttttctaactccataaatgcgagcttcggataaaaggttattttcctctacttctctacaaaagttcaaaaaaccattgtctggtataaaaccggtgtaaataactacctgaacatgtattggtggttttattactttatctctaaattgagatgtagcgcatcgtattggccttgactgagtgtggttaatgcgaaacgcataagtcttgaaagtatcttatgtgggcttagaggcgctgtaagcgaatgtttggctggtattcactcaaactctgactatcgaaataccttcttaaggttttgctaatgaatgtggggaaatgagaacttatttctcttagattaaaaagtatattagcaccaccgtagcgaatatttgttcattttcagcgcgttaacgttcggttctgattgcgctgaagctctaagagcgaaaattgcagcgaacttgttagattactttattttaccgtctcggtagcggttatttattacccgtctatggccagtgttatacacagggaaaatagaagaacagaatgtagacatacctgcccggaactgaatattgcgcggctatgctctgctattgtgaaggtttgttatttttgtggcgtattgtgagtatcccagatccacaggtgatcatgggaatctggctaatgactgatgcagcggctagacgtgtggcgtgggttgtctattgatgctgacctgaagttgggggcgttatcctactcgccatctgaaatttacatcggtgtctggttgctaatttctttggctggcgggcaaattctggcggccatactaacctaactgggcacctagtggcggtgggcattacctttacgattttagcgattacctgttgtaacctgcggatcgtatccaggagctattttatcgtcgaccatctttaagcctaggcaactttatcgacttcaggcttttcaatatcaatagtggggatgaggtgcaggtagagtatttcgcgttactggattcggtcattccaatgtttaagtctgatcaaaccgatcttttgccggttgaacagccagagattaagtcatcattaactggggaggggcacggtataattcagaatgtctgatgaaggttggttgactctacatgacgagaaattgcagggatagcgagcgaataccgctattttaccaatagtattgaccggcgttatttgtgaaaggcgtaaaaaaaccaaccacaatgggttggttttaaaaagattctttggtcggcatgagaggatttgaacctccgacccccgacaccccatgacggtgcgctaccaggctgcgctacatgccgacgcagtaaatttatactacattttctctccgatattgcaagagtcgggcgtaacgttcgcttgattattaatcagttaggctaatgtcacctagttggcaataaagcgttttacgtcggttagcacctgcaataacagcgccagctgcggtttctcatctttcacttcatggccttgcaggtcaaaggttcgataatttccactgttgtcgagcacaatagtttgggttggcgtagtaataaccagcatgccgttttcaccggtagcaagccaattatgaatccgctgagcggcaaataaatcctcaccctgcgagtaatcttctggcgaagtgcgtacatgcagtaaacgctgcatcagcgtcgtcataacatcttcatggctggtcagtttattcactttttgtgctggagtactcggccagtgaataatcagcggaacctgtaattggtgacggttaaagttgctgccagccccccaatcaccgttgccactatcattaaattctacgccgtgagacgcggtgatcaccaccacggttttatccagcaaccctttggttttcaaggtatcaatgatagtcgcaatttgctgatcgacgtttttggcaccgtcctgataatggctgataaagtcatttggcgcggccggattgccaccttccaccgggtcctgcgattcttgtgaaccaatcaggttaacgtaggagaaccaaggcgccgggctggataaattattcaaccattgttgccattccagcgttgtcgcgctgtcgctctgacgttttggctccggtaacgaaaaatcggacaaaagagcctggcgatagagcgccgactggaagccgtcagaggagaacaggccgaactggtagccttgattacccaaggcattaataaaggccgaaggttcacgggcggccaaaatgccgtccaaatacgtcggggaaatcccgtaaaacagaccaaataggccggtttctttccggtttcccgcgctgtaatgacgattgaactgaatattatattgagcaaaatcattcagagctggcatgtcctgcttcaaactatcagggcgaatcccgtccacgacgatcatcagtaggttatagccgctgcccttatcgctaaaggtaatggtattgagcggatattccacggtaacggcttcgggatttccttgttcgataatgcggcgttgatattcctgttgatccagcaggccgtgtttctccagaaacttacgcgccgtcataggataggaaagcggcagattggcacgctgcatggtgattggccgatagaaattggcgtccgcccagatataaatcaggtgggaggcgaaaaacgcagaaataaacacggcaaccagcggtttaacgaacttttgccggttcaggctacgcagcttttgccagcaccaggtgccaaaaagcatctcaaccaaaaagataataggcacagaaacaaagattaactgccagtccctggccaactcgctttgatcggggttaaccaccagctcccacaccaccggattgaggtgcaagtggaaacgggtaaaaacctcactgtccaccagtaatagggtcagacctgtagtggcaaatgcggcggaaaggaacctgagtaaccgctgcgacatcacgacaaaggtgagtgggaaaatcaccaatagataggcagcgaatacgataaaactgaaatgccctagccaactgaccagggcataggtacggccaaccaaagaggctggccaatcggaaacaaatagatagcggctgcccagcaccaggctaaacagaatattgaataaggcgaaccagtgcccccaactgatcatttgggacactttttcacgatagcgctgacgatttgtcaccatatagagatagcagtcttaattaagtaattaatgagctttatcttcacgtaccgaagcctgaagagcctcggcgaaagatcgcgccaataccttgcgttgcgctggggcaatgctggtattgagcagatttgtaaccatattccccaaaaccatcaaggaaagatcggttggggtgcggtgtttttccagtacttgaaccagttcagaaagcaactgttcaacgtgttcgtcactgtaacgagatgattgtggcataaaaagtgtgctcaacgcctgacaaagtcccacatcttaccgtatagagccgcgcttttccgctactttatagcattaagaatcaattgcagaggattcggcgttcacgccgcttttgagttgcggcatcagagcatcggtgtttgaatacgcccctagctaaaaggagtatttatcatgagccttgatatcgaccaaattgctttacatcaattgatcaaacgtgacgaacagaccctggatgtgatgttgcgggactctttactgccgactaatgcggtagttgaagaaatgatgacggaactgcatcgtgtttatagcgccaaaagcaaggcgtatggtttgtttaatgagcaaagcgagttggccgatgccttaaaacgctgccgtaaaggagacgaagattttctcgcctttagccgcgcggctaccgtgcgtctgcgggatgaactggcgaaatatccttttgccgaaggcggcgtggtgttgttttgtcagtatcgctatctggcggttgagtatttattgatctcagtgctaagcagttgcaacagcatgcgggttgatgagcagctagatttgagcacaactcattatctggatatcaatcgcgctgatattgtggctcgcattgatctgaccgaatgggaaaccaatccggagtccagccgttatctgaccttcctgaaagggcgcgttggtcgtaaggtttctgacttctttatggatttcctgtctgccgccgaaggcctggacaccaaggcgcaaaaccgcggtttactgcaagcccttgatgactattgcgccgatgcgcagttggataaaaatgagcgtcaggcatatcgtcaacaggcttatagttattgcaacgaacagttgcaggccggcgaagaaattgcgttgcaggaactggctcaggaattgcctaaactgggtgagaaggactttaaagagttctccaccgagcagggttatgcgctggaagagacgttccctgccgatcgtagcactttgcgacagctgaccaaattttccggcagcggcggtggtttaagcattaacttcgatgcattattgctgggcgaacgtattttctgggatccggccaccgatacgttaacgattaaaggcacgccgccgaatttacgcgatcagttacagcggcgtttgagcggcggcgacaaatcctaaaatagccgctcactgctcaagtgttatcgacgtaacgccacggagtctggaaacctttaacattggtttctaaactcggtggcgttatttttttattacatatccatgaggtgagtttattgtttgttttctatggttaaatttaagtgagcttaaatctttattattacttttcattaaatcctattagttaataattttattggtggcttcatggtaattccggatgccattgtttatttattctaatttgttttttatttcactcaagcatagtcttattgctcaccatggtgatgtttattttcatttaacttaacttaatttaattaccgaggatttaaatatgaagacaattgaagctactgagttaaatcttatttcaggcgcattagcaggagatgtaccaactcctgcgatggatatgacaattgctatcaccacggcgactgcggccggtgctacaactggcgcattgtttgggccgattggtgtagccgttggctctgcaattggtgcggcaactggtgctattgcatcaatgggatggtaacagttttattaaaatacttaatgctattgttttttaaatagacatttagtttgttataccggcttctctgttatttatagcagagaagctttaatgcatgtaaaaataataaatcagaagtgaggtaaatattgcctattggctgatctttcgggtggtgtagtatttatttcttgagtagcacgctattttaattggctttgtatgtgttttcgatcgaatcattaatagccagcagcagaaggtaataaaaatagcagctaataaaaatgccagtcagagtaaaccgactggcatctcccatcgcatcagcgatgctttctcattttcggcgtcccgaaatatcgatatcgcagattaaacgcgaacgaaatcgatatgagtcagttttggtttgaaagcgtgacgctgaacagcctgaacctgaactttaacttctttaccatcgataaccaaagagattggctcgttgtaaaaacctggtttgacttccatgtttttagtggtgtcatggtccagagcgatagaaaccgctgcttcctcgccaccgtaaacgatagctgggaatttatttgctgcacgcaggcggcggctcgcacccttaccctggtcgttacgtacttctgcattgatagtgatcattttgttttctcttaaaagaaaatttaccctgctacaggcgacccagcaacaggttcgatagtcggcttactttgggcgaacccagagtaaagcgggcggcattctagcgaaatatcgaccagacagcaaacaaaaccgcaaataactcagggcagaaaggcgctagccaagggcgtttgccaggcgaaaacgcccctgataatcaaaaaccttttcgcgaatttgccacccttggccccgtttccgggcaacgacaaaatcggggtgacgcagtagcgcctgctgggcgatcacgtccgtcgccgtttgccattttaaggggattcccggcgcgcgttgatggggacgcagaaatatttgctcaaaggccatacgctgtgcggacgtggtgaggcgaaagcgttcgctggtactggtgccgtcttcatcgtaataagtgattttcagccattctcctttggcatccttgcctgattccagcgccattcctccacagcgcagaaccagtgcatctttcagtcttagcgcggctttgagcatatcatcgggatcgaccagcacttcctggcactgatgacagcgtcgggcggcaatgtcattttctgctccgcaatgtggacagcttttaaaccggaaacgatagtcacattgagcgcgctggccttcatcatcttcaaaccagccctgacagcggcggccatagtgttcgataatatcgccggattcagtgcatttcccccaaaatacattggcaaaaccgcagtctgggcaaaagacctgtaccggctggctgtcgccatgaggtttactggtacccacttcgggagtgaacagatcgtgtggattaccggcgtagtcgagaatcaagcagtcttcctttcccggtgataatcgtaacccgcggccgacgatttgctgatacaggctgacggattcggttgggcgcagaatggcgatcaaatccacgtggggcgcgtcaaaaccggtagtcagtaccgccacattcaccagataacgtaattcttgttgtttaaacgcattaattaacgcgtcgcgttcggcggcgggggtgacggcgctaatcaatgccgcctgtcccgcggggagcagcccgtacacctctttagcgtgctctaccgtagcggcaaaaatcatcacgcctttgcgagtggctccatattcgacgatttggctgacaatatgcggcgtaatacggctttgctgtttgatttcccgatccaggtcttcctcgcgaaacagacccttgctattactggtcagacggctgaaatcatactgcaccaccggcatatccagccgttctggcggtaccaggaaaccgtttttgatcatgtagcgcaggggcaattcatagatgcaatcgcggaataaactattttcatcaccacgggtaatgccgtgatagtggaattgataaatccagcctttgcccagacgatagggcgttgcggtcaaacccagtaagcgaagcttcggattgtttttccgtaaatgctgaatgatttgctgatattggctgtcgtcttcatcgctgattcgatggcattcatcaatgattaacagggaaaaggcactatcgaatagtgagagattacgtgctacggactgcacgctgccaaagacgactttgccttcgctttgtcgttgctgtaaacctgcggcaaaaatatcggcatccagaccgtaagcacaatatttagcgtggttttgtgccactagctctttaacgtgggccagaaccaatactcgcccgcgagccagtttagccagctcggcaatgaccaaacttttacccgcgccggtgggcagcacaatcagagccggttccgggtggcggcgaaagtgagcaatagtggcgtcaaccgcttcttgctgataggggcggagtgtaaaagccattgcttaggctaccccaagcggaacggtggtcatttgcaacatatccttaaggtttttagcgaaatctatccggttaaactcgacattattttctattattatgcctattcggtgccataggtgcgagaacctctcggtcgggtgtaactgttcctaggatgataggacaacccccgttatactgatgtgtctcataggcagcaaatgatgttcctcctacacgatttttactgcttcatttaatttccagcgttgctactcctcaaagtggcaaggcaacgtgttgattagcaacacgaccagacaaacaggcaaagtagattcaatgcgattggacaagtttttatctcagcaattaggggttagccgtgcgttggttgcgcgcgagctacgggcaaaacgtgtgaccgtggacggcgaaatcgtcaaaaccggcgcgatgaagctgacgccagaacaggaagtgatgtttgatggcaatctgctgcaacagcaggtggggccgcgttactttatgctgaacaagcctcagggctatgtctgctccaccgacgatcccgatcatccaaccgtgctgtatttcctcgatgagccggtggcctataaattgcatgcggcggggcgtttggatatcgacaccaccggtttggttttgatgactgacgatggtcaatggtcacatagaattacctcaccaaagcaccactgcgagaaaacctatctggtgacgctggagcatccggtggctgaagataccgccgagcagtttgccgtgggcgtacaattgcataacgaggctaccttgaccaaaccggcgcagctggaagtgatagagccgcaattggttcgtttaacgatcagtgaagggcgttaccatcaggtaaaacgcatgtttggtgcggtaggtaatcgcgtagccgcgttacaccgcgaacgtattggtgccattgtgatggatgaagatctggcacccggcgaataccgcccgttgactgaagaagaaattgccagcgttggcgctccgcatctgagttaacagcgccatcgtttatcaaagcgattatgtgtgaacctaagagggaatcccttgattttagggattcccaacgtctcgggcgttgccaaaacgaaccatttcccccgccatcgtggtacgactgctctgttcgatctgaataatttatttggaacgaacggctgttgaaggagttgcaaagcgtgcaagaaaaacgaacatctcatattggtttgatcttaattctgggtttgctttccatgctgatgccgttggccatcgatatgtacttgcccagtatgccgattatcgccagagagtttggcgtggaggatggtcgcgtacaaatgacgctgagcgcttatgtgctcgggtttgctattggtcaaatgttctatggcccgatggcagacagtattggccgtaagccggttatcctgtggggaacggtaatttttgctctggcaggcgtagcctgcgccatggcgcaatcggtagagcaactggtcaatatgcgcttcctgcacggtttatccgccgctgcggccagcgtcgtgatcaacgcattgatgcgagatatgttcacgaaagatgaattctctagaatgatgtcatttgtggtgttggtgatgaccatcgcgccgctattggcaccaattattggtggcgctttgctggtgtggtttagctggcacgccattttctggagtatggccggcgcagcgctggttggtgcggtgctggtagcgttctttattaaagaaacgctaccgcgagaacggcgacaaaagttccaccttcgcaccacaattggcaactttggttcactgttccgtcataaacgcgtactgagctatatgctggccagcggattttccttcgccggtatgttctctttcctcagcgccgggccttttgtttacattgatcttaacggagtgtccccgcagaacttcggttattactttgcgctgaatattgtctttctattcctgatgacgttgatcaatagccgaaatgtgcggcgcgtcggagccattaagatgttccgtttcggcctgtttgtgcagttggttatgggcatcggtttagtggccgtgtcagctttgggactgggattctgggcgctggtgttgtgcgtggcagcctacgtgggctgtatcgcaatgattacatccaacgccatggcggtcattctggatgatttcccgcacatggcagggacggcttcatctctggctggcaccttgcgttttggtatcggcgcgttggtcggaaccattttgtcattggctccttcccgcagtgcctggccaatggttagctcaatggctttctgtatcattgcggcagtattcttctatctgtacgccagtcgtccgggcaaaaaggcggcctgatttggtttatcacgctgccggttgtttcgccggcagcgtgataaaccactttacctcaatgatttttccccgctcggctttcccttttttgttcttctgcaccaaatatttattttactgataactttatatattcaatcaccttctgaaatgacccaatcagaaataaggtgatattagtaagcgcgcttattatcatgttgattacttgttaatgttggcttgaaataagttaaaataaggaaaataacatttcgaagaatatgcggttttcgcgattattttccatgcattaaatcctcacttaataatatatttatcaatgagatgtcggtgttttcttcctggttttcggcggggaggtgttccttatttgtaaaatattaacgaaaagtaggtaaccgacttgcaagaaaaatggttgagaagacatgcggaaaggtatacatataacgaaaaaatgagatctaaatctcaaactcgctttttgggttagtgtagggaagcgggaaagacgtcagaaatggccaaataaataaccttgttagtgataggtttatgtattgttataaatttacactttgatgaggttctaatcaggcataatggcgctttagcggctataacttagttagcatgtgactttgttgtgcttttgtaatagttattgttaattttttactaggaaagacgcgtgaataatattcaactttcggtggttcatcgcctgccgcaaagttaccgctggctgtcaggctttaccggtgtcaaggttgaaccgattccgctagcgacgatagatgaaaagaacaacctgatggggttgaaattactgagtcatgacggtagcgccgccaggcaggtaatgcagcgcctgcacctttcgttgcaagaaattcaggttgattctgctattgtcgaatgggaaggggagccttgcctgtttgtacactgtcatgatgaaagcgccgctatgtgccgcttgaaaaatgtcggtgttgccatcgcagaaaaaatgacagctctctatcctttctaatcctccgcggcagaactgtctctgagaaatttttgcatgctcaaggttcctgcggcttttaatcggctagttgcaataactgtcgggtataaggctgcgccggtgcggtgagtacccgttggcaatccccttgttctatcacttctccctgtttcagtacgatcagctggtggcacagtgatttcactacctgcaaatcgtggctgataaacagatagcttaattgataccgttgctgaagcgatttgagtagcgccagaatctgtgcctgcaccgatttatccagcgatgaggttggttcatcgagaatcaatagctgaggctgcaatatcagcgctctggcaatggcaatgcgttgacgttgcccgccggaaaactcagtgggatagcggtggcgagtggtcgggtctaatcccacttcttccatggcggcaatcacacgctgttcccgctcggcggcgctgagcttctgatgaacctccagcccttcagcgataatttgccagaccgccagacggggattgagcgccgagtaaggatcctgaaataccacctgaatacggctgcggaaaggcagcatctgcttgttattaaagctatgtagtggttgaccgtcgaaacagatctccccgctggacggtaataaacgcagcaatgccagcccagtggtgctttttcccgatcctgactcgccgaccaaaccgagactttcccccggacgtaaatcaaagctgatacctttcaccgcgtagtgatggccaaccgttcgacgcagtaacccttttttgataggaaaacctacctgaagatttttgacgcgcagcaggggcgctgccatcggcggtagcggtattggctcgccttgaggctcggcgtcgagcaattgccgtgtgtatgggtgctgagggtgactaaacagcgtctggcggtcactcagctccactctgcgcccttcgcgcatcaccgccacgttatcggccagacggcgcacgatattcaggttatgagtgataaacagcaaactcattcccatttcttgctttaactctttcagcaaacttaaaatctgcgcctgtaccgacacgtcgagggcggtagtgggttcatcagcaatcaacagcttaggctgggtgagtaccgccatagcgatcatcactcgttgctgttcgcccccggaaagttgatgagggaaatctccgagccgccctttggcatggcgaataccgacgcgatccagacagctgataatctctgcacgcgcgctttcccgccccattccgcggtggagggacaacacttccgccagctgtttttcgatagtatgcagcggattcagcgagaccatgggttcctgaaaaatcatagcgatctggttaccgcgaattttgcgcagcgtattttcatcggcatggagcagcgattgaccggaaaatagaatgtctccgctcggataaaccaccggcggtgaaggtagtaaacgaagtaccgacagggcggtgacgctcttgcccgatccggattcgccgaccagtgccagagtttcaccggcttctacctgcagggaaagctggctgacaacctgacgttcctgttggttctggcggaaagcaatactgagatcctgaatatccagcagaggagtcgccatatcaatacgccttacttgggtcgaaagcgtcacgcaccgcttcgccgatgaaaattaatagggaaagcagcatcgccaacgcgataaatgcggttaatcctaaccaaggggcttgcagattgtttttcccttccaacaagagccctcccaacgatggtgagccgatcggcaggccaaatccgagaaaatccagtgaggttagcgtggtaatagacccacaaagaataaacggcaggaatgtcagagttgctaccatcgcatttggtagcatatggcgcgacataatcacccgatcgcgcacgcccatcgcgcgggctgcccgaatataatcgtagttgcgggcacgtaaaaactcggcgcgcaccacgccaaccagcgccatccagccgaataaaacggtaatcgccagcagccaccagaaattgggttgaataatgctggacagcaaaatcactaaaaataacgttggcatacctgaccaaacttcaataaatcgttgcccccataaatcgatttttccaccgtaatagccctgcaccgccccgacgcaaatgcctatcacgctggaaaatagcgtcagggttatgccaaacagcatggaaatacgaaagccatagataaccttagccaatacgtcaccgccgttgctgtccgtgcctaataaattgtggcgatcgggcggagaagggaagggaacctgcgtggagaagtttatggtgttattaccaaagcgaatcggcgcccatattgcccagccgtggtcttcgatacggcctattacgtaagggtcttgatagtcggcggcggtagttagaataccgccaaaggcggtttcatcgtagttcaccataaagggcatatagagtttgccctgatagctgaccagcaggggcttatcgttagcaataagttctgcgaataaactgatgataaacagcgtcaaaaaaatccacagtgaccaataaccgcgtcggttgtgtttgaaacgcgcccaacgggcacgattgatggcgctgagtggtttcattggcggccctcgaaatcaatgcgtgggtcaaccagcgtgtacgtaatgtcactgataatattcagtaataagccaattagcgtgaaaatatacagagtgccaaacatgaccggataatctcgttgtagcgtggcgtcgtagcccaataggcccagaccattcagagaaaacatcacttctatcaatagtgaaccggtgaagaacatactgataaaggtggcggggaaaccggcgataactaataacatcgcattgcggaacacgtgacgatacagaattttatcttcgctcaaacctttggcgcgagcggttaccacgtactgctttcgaatttcatccagaaaggaattcttggtcaacatggtcagagtcgcaaagccgccgatcacggtagccagcaccggcagtgtgatatgccacagataatcagtaatcttcccgtaccaaggtagggtatcaaaattactggataccaggccgcgcagcgggaaccaatcgaaataactaccgccggcaaataccacgatcagcaaaatagcgaacaggaaggagggaatggcataaccgataataattagcgtgctgctccaagtatcgaaggccgatccgctgcgcaccgcttttttaattcccaacggaatggataccaggtaaataatcagggtgctccataaccccagggttatcgacacgggcaggctgctttttatcaaccccatcacggtttcgccgcgaaacaggctgtcgccaaaatcaaagcgggcatagcgccagagcatatcgaaataacgttcatgcagaggcttatcgaaaccgaagcgctgtttaatttccgctatgacttctgggtcgagtccgcgtgagccgcgatattgtccttcccctaatggcccggcgttcacgccgactttcgcgccgcccagattcccgtctgaagcactgttcaaaccgctgtgctggccaaattcgatattagctatggcctgatccaccggcccgccgggagcgatttgcacaataaagaaattgatagtgatgatcgcccacagcgttgggataaccaataataaacgacgtaataaataagcgcccatatgttgctccttagcgccgttcagccggcaaatgagccgctttatttacgtcgaaccaccagctatcaaagcccagagaataggttgggcgcaccgcaggcatagagaatttatcccaataagcaaaacgggtgtgattggaataccacataggaatcataaagttattccatgtcagcactcgatccagcgcgcgaccaagggagagtagggcctccggttgcccctgatggctaataatttgctgaatcagagaatcaatagccggatcgctgacgcccggacggttatacgtagaatcaatatattctgagctccaatatagccgcagataagtgcttgggtaagtgaaggcgggataaaccgccgggagcatatcgaaatcgcggctgcgcaggcggctaaggtactgtgaactatctacctcgcgaatattcatggtgatgcccaaacgttgcaggttatgtttgaacggcagcacgtattggaaattgctgccgctgagtaacagcatttcgaagacaaaaggttgccccgttttgctattaatcaaccgctggtttttcacttcccagccggcttgctgcaagagttcgcgcgctttcagcaggttatcccgatcgttgccactaccgtcgctggaaggtggttgatagattttgctgaaaacttcgtcgggtatcttgccttttagcggtgctagccaggctaattccgcgctatcgggataaccggtagccgcatagtcggtattttggaaaaaactgttggtgcgttggtaactgttgaaatagaaagctttattcatccagtcgaaatcaaaggctagggtgagcgcctgacgtacgcgccgatcgctaaatagcggacgttggatattaaaagccatccaacgggtattttgtgccgatttatcctctaaatcctgcttaatgatgtagtttttggcgaaattgctaccaacatactgcgatgcccagcttttgggcgacgtttcttcccgcaggtcaaaggcaccggatttaaaggcttccagtgcgactttatcgtctaaataataatcgtaacggatggagtcaaaattatacattccgcgattgacgggcaaattggccgcccaatagtcgcgcactcgttgataggtaatatattggccaatgcggtaatcgccaatgcggtaagggccgctgcctagcggcggcttgcttaacggctctcccagtttacggttctgccagtcgtgcgcgggtaaaaccggcagccccaacatactcagcaacttatctttacccggctctgggaactcaatgcgcaccgtcaggcgggaaatggctttaaccttcacgtctttataagcgatgcgaaattgaggaacgccttcggtcattaacttattaaaggtaaattcgacgtcgttggcggtaataggaacattgtcgtggaagcgagcgtgagggttgatatcaatttcgacccagcgcatatccgcagggtagcgagcagattcggcaatcagcggataatagctgccgatttcatcgtcagagctggtaaacaggctatcgtacaggcgttcaaagccaaccgcaggcacgccgcgtagggcaaagcggttaaagttatcaaaggtgccaatggcggacagcgtaatattgccgcctttgggtgccgccggattaacataatcaaaatgagtgaaatcagcggaatattttggctcgcccaaaattgagaatgccacgccttcgtttagcgtttctgcatgcaatcctagactgaaagtagcaaatattagtgcggtgaatgcccgtaatagcatgataacggtgaacccctgcgacaaacctacatagcaactgtttcaagtaaaactaccagctgtccgggtacgaaggcaaacattaaagaaatttgttttcattacaaaacttcagcaatttctccagcgttaacggcctgctgagtaaataaccttgcaggaagtgaacgccgtgagcaatcagatattgtgcctgttgctcggtctcaattccttcggccacggtttcaattttcaaattcttcgccagtatcaatacggagtctaaaacgggcgcggtaagggtttcaaatccgatattattgataaatgcccgatcgatcttaatatagtctagcgtgaagcgttccagataaattagcgcgctgtgtccggtaccaaaatcatctacggcaattttcacgccgtgctcacgcagccaggcgaattgggaaatagcttgttcttcttctaccatcccacgttcggttatttcaaatatagggtcgaaggtatctaagggtaaccgcgctaacaaacttaaaacatcctcacggaatgtcggctcacctaaatgaagtggtgaaatattaaacgccagtttggtgccggtgggaatggaaccaaccattctggccgcatccgcaataattaaatcaaacaaatgctgggttagttgttgtatcaaaccctgagtttcgacaacgggaataaacaaatccggcggaatacgaccctcagtcgggtgctcccaacgcaccagcgcttccagcccggacattttacggctggttgcttcgaataccggttgatattcgataaagaattcaccgcgcttcataccgcgcagaatctcggcctcggggttttggcggttggacataatgtaataggcagaaattccgacaaaggcggccaataataatccgccaagtaaaattatccgaatatcactggctgtgaaattgacgctatacaatagtaacttgatgggataacccggaatctggatctcgcgagaggctgtgtcgggcagttgttcaattggaatgactttggcattaaaggttgtcacggcctggttgccaataataatcgccataccgttgacgcccttatcattaaagttaagcaataaataaggacgcaggtttaactctaaagttgtcaatacgccggtatttccgcggccaggctgacgtagccaaacggcgaccgccggtttatctggcagaataggcgtaccctgctgaagcttgaaatccagagtctggtataaattaagttttgggtaaatagcgttactgctgacatgcatttcgccggtagccgacgagcaataagtgaaaccatttcgtaccagtaagaatgtccgcacgccgttcgtaaacgctgccttatattgcagtgcaggctccgctaacttgcaggatttctccgttaatggaatcagctgagacatggtggtggttaagtcatttaagaaatgcgaggagtaagcgactatttgctcgctctgggcagataatcttttctcactgttacgataaagaaaagacagagtaacggtaacaaaacaaataaagaatatcagagaaatagtggcactttttttaatcaggcggcgcggggatacaatattgcgaaagaacgcattttttgaacccatgataacgcgactccctgacccgatgaaaaaagtaattataagtataaatatcttagcggtgaagcgctactggtttggtattagcctcgatgcttcagagctgatattagactaataaataaaatttaatattttaaactgacttaatggcaaaaatgtattaaatagacttaataatgtctaactttaattattaatatgatttttacctaagctaagttggaacaatatgctgcggttggtttaatcaacatcaaacaaggaaacagagtaagccttagctgtttctcgtcggcgattctacaagagaatgagggattgtgaaccccattgagcagaaaaaggacgtttcctacagcataagggaactaatctgaaggcgttgcaggttcaacagcaaaaaacgctgcgacaagggcagcgttttatcacttcgtttggcatttctgagcaagcagggaactgtctcaattagctttgcgtgcggttactcagtacgcggcggccatcttgataacgcttattccagtaagtatcggtcaggttcgaaattgtcacaccgacactggtcgaagcgtggacaaatttatcgttacccagataaatacctacatggcgtcctgtcgaacctgcgcggaacagcacaagatcaccggggcgcagttttgtacgctggatttttttaccaatatcctgctgctctgaggttgagcgcggtaaatccatgccaaattgttcgcggaaagtcagttgtacaaaagcggaacaatcaataccgcgtttgctgctgccgcctaagcgatagcgaacccctttccaacctgcgtactgttctaaaatctttgacttgatgtcaacgttgcgaaccatcgcttcgaattcatcctgagaggcttgcagtaaaagaccgtttttatcattaactgcacgcatctcagtttgcgtattttgtagattcgaagcgttgttcgagctacacgcggataacatgaccgcggcagctactgcaggtattaaccgcagaatgtatctcataataggttgagacttgaccattgttattgttttcccttgctgtccttacgacggatatcgccactaaaaaatgccaaacgaagtgagactagggttcacacatcgatcagacaataacttaaacgaataaatgtgcagagacgcacaatttttattggattaagcgcaaaatgctgatattcgagcgcaaactttttcgaggttaccggattgacttataaaaggcgagtatttttgcacagattcttataagaaatcctgatgtaacataatgttatattttattccttactcgattagcaatcagatacatcaaaaaccagtttaacttattgttttaaaggtaaataactggcttatcattgctctcctcgtcatgacgaacttttgtacactaatatagctctctaaaaattatgcatgaatatgtaccaaaacaatttgggcaagggaaaagtaaatcatgaccagcaaggcatttaacttgtaaacaaaagcaggtctttttgggagtattcctaatttattgcctctggaggtatctgacgaatcttctatttgcgcattgcgtgcattgtttatcctgatatgggtaacctgatatagataaatagcgctgagtatccttggaaggatatgtgcgttctaatggctaattaggctgtcagtaaaagtgtaatgtgatttgtgtcacccttttagggtttaataaccacttaatcaacttcagtcataaccgtggttatctgcgcaggttgcagtttttctatcaccttgtttcagcgctcaacggtttaatatttggaatatgataacgaacatattggtttatctttaaggcgatcgatgcgattttcgtcgaaatagcggttctaaaatagaagaaatttttaattcgactcctttctaactttgttgttctttgcactgctctaccaaataaaaaatgtaccgttgagctggggaaatgtcttgcggtttgggtgtgactcgcagtgaatttgtcaccaacgctggtagccatggtggggaagatactttggtcaaggtgattaattttttcgaaaagaatcaatccattaattaaccaaccgagagccgtatgctgtcacataatcaaaccttaaaacgtcaagatgatctccataaattgctgaaggatcactactcgttatttattcaagggattagcgagacacggcacatttctcctcgtacagtgcgacggaatatccgctccctggtcataaagtatccgaacattaacaggttctatggtcgggttgctatagatgcatgtgtccctggaagattttcctcagagtcaaatcatccttattaggggaaatatagggaatagctgcgagtttacctatggggaagaaaccatctggtaaattggccgctataagtttgatgtgtcttttatttcaaacgagcactttgacttggtacacggagtttccgtgccccgtcttgataacgtaagaatgaagcagcagctaatgctttgttcagaaaaaagttatttgattgcagaagggattaagttcaataagttctcattccataaggttgccgatttgacgcagtttgacggcgtgataaccgatggcgctattccaaaaaagacgattgatatgtcgatcagcaaaaatacggaaatagatttaatcgagatctaacggggagcggcgactccccgtggcgtggaaatacgtatcagagccgtggacgctgtgcgctcggcagacgttgatttatccagtcaatgattcgatcgctggctggcgtgagtaatatccaactggcaccgaccaatacaacggaaagcgcgccgacggcaatatcagtaaaccaatgggcgccgatcattattcttggcagagagaacacgatggcgataatcaacgcaatggcaaaagccccgcgtgagaaatagcgcagcatgaagcaggcgaatatgattaacatcatgccatggtcgccggggaagctatcgctggaggcgtctttggttgggataccaataagctcgctaacgcggttgatattctcaaataccagcgtcgggcttgggcgtttaaccggtaataaatgtccgagctggttaagaaatacggccgtcagtaacatcacaaaacccattacgattaaacgacggcgtcctgccggattttcttttaagaaaaaatacatgtacagcgtgcccatgcacagcagagaaataacgtcgaaggcacggttattggttaccgccaccacatgtaggaaggttgggctggaaagcaggcgctcattgaagtaatggaaaatggcggaatcggggccgaaccaccaaccatgattttcaggtaagtaccaggataggaacagggctatacccaataggttgagcatcaagattgtcggtaaattgcggcgggtcatgcgaaggcctatatataattagatgtttaaaacagtaacgcagataaaaatacgtcgggcattatacctacttatgtaaacgaatattcaacaaattgccctgtagcttattccagtcgttgtctccggaagaaatcacttcaattcgactgtctggcggcggagtggggcgggtctcaatttgtaaatcatttccctgccgattaaccaccaacgcgccttcgggaatacgcatcacgcctttaacacgttctaccggactcaaacgaacccattcaagcaacggcacggtgtcaaatatcgcctcgctgttaaatacccaaccgcagctagtataaccttgcccctggttaagcgctctgcgccagggttcgctaccgttcaggtttaatgcagccaggcctttttttggggatgattctccgtgatgatggcgtgcatccggcagttgggtcttattggtatgcagaatatccaatacggaaatagctatttttcccgaatcagagaaatatagcggacgctgcgaattctgagcttgctgccattttgccaatgcctgacggtcggtatcgatataagtatcttgcttactggcaataatgacatccgctgcggctagctggtcgcggaaattctcgttttcagtgtagcgttcatcatgtaattggcgggcatccagcaggcacagcgtggcgctaagactaatccagggctgataaatatcggcggttaacagagacaaaatttgctttggatgacccaaaccggtgggttcgattaataaccgatccggtttggcctgctgtagcagcatattcaatcccacttgcataggtaaaccattcacgcagcacatacagccgccggggatttcttttagtatcgcgccactatcggataataacgcgccatcgatgccaatttctccaaactcattaactagcaccgcccatttttcatgttcgggtttttgcgccaataactggcgaatcagggtggttttaccgctgccaagaaaaccggtaatcagattggtttttgtcaccacatgctcccagtaaaaaaacgttgcgttaagcataccgaaaaataaaggcagcggaactgtcacatcatgcgcttaaaaatataatttattaagtagcttaataatcaatcagttattaagacaactcttaatgcagagcctgaataggctaacgactgacgttgataatttaactattttaatgggttatgcgccgattaaggtagtaaataatgccttatcaacaccattgttttgagcgaaatcctctactctttaattgagtcttagcggattttgaggtgaacatgggtcaatatcgagtactcagcgtcgcactggttttattttcatggaccgcattggcttatggcacagccaccagcggtatcgttcgctttactggctccattgtagatgcaccctgccagattgatttttctgcacaaactctggcaacccgatgttatagcaacggaaaaaacctttctcaacgtcaagttatcacgacgggcatgaacacaacttccaacttaccggggaatctgggcacttcagaagttcaatggctgaataaagaacgcaatctggctattgtcaccattaattatcgctgaaagaatagctattgctaaaagaacagtcgtagctaaaagaataattatctctgacaaaccaacgcttatccattcaacgctagcagcccgatttaattaaatcgggctaatctgtagcataattctttgcctttctgtgagcctctgcgcagctctgccgatttttctgtcggaccagatgttatacttccagtcacatatagggatattatcggttaaacccacctttttggtcaggccaattcagcttggtactgttaaacaggctagattcaggtaataaaataatgcgtttataccaagaagtcggcgggaaactgcgcgatgcactgaatgcgggtgaatatatcgcaggcgatcgcctaccgccagagcgagatattgcagaaacatttcaggtcagccgcagtgtggtgcgggaagcgctcattatgcttgagctggaacaacgggtggaagtccggaaaggctcgggcgtgtatgtgcttagcaaaccagaaaaaaatgctgatgatgagcagcccgaaattattgatagtgggtatggaccgtttgaattgctacaggccaggcaactgctggaaagtgaagttgccgcttttgctgcattgcaggccaccaaggccgatattctcaaaatgcggcaggcgatagagcaggaaaggctgtcgctagaagccggacaaatagatgaaagtgccgatgagctttttcataatcttctggcgcaatcgacacaaaatagcgtattggccagtatggtgcgggaagcttggcaggcgagggataccagcgtgatgtggcagggcgttcacctgcacgttgccgatttcagctaccgttggcaatggctggaggatcatcaaaagatcttgcaagcggtgttacggcgggacagcaaggcggccaaacaggctatgtggcagcatttggaaaacgtgaagaatattttgttagaaatttccgattccgatcatcctgattttgacggttttttgtttgaatcggtgccaacattatcagataacggataaataacgggcagggataagttggggatagatggtgtgaataaaattaatagcgcggctaaacaatagcggctaaacaataaatgggaatgctttgcgacaatgccactgatcgccttagacggccagtggcattggattgatcaggctttctctaacaggacgcgcaccgtttctttggcgccattttgttgtaactgaacataagcctgagtgacggcagcgacaaattcagcccgctgcggcagctcttcgccgaagatgctttttagtgccagcaaagcctgcactcgttctgcgccgtctctggtttccgcgacgcaggctttaaaactttccagcattggatcgcgaatatcaatttcctgacctgcatcgtcaataccgccgacataacgcatccagcctgcaatgcccagcgccagacaggcgtaaggtccgccgtttttcagatgccaacgcacggaatccagcattcgctgcggcagtttttggctgccgtccatcgcgatttgccaggtgcggtgtttcagcgaaggattgcggtaacgttcgataaggctatctgcatatgcacctagatcggtattttcgacgctaagcgttggtgcctgttctgccatcatcaactgacgagcggcacgcacatagttggcatcggtcatacaatcgctaatatgttgataacccgccagataacctaagtaagccaagaaagaatggctgccgttcagcatgcgcaatttcatttcttcaaagggcagtacatcagccactaactgagcgccgacggcctgccagtttgggtgtccggcaacaaatttatcttcgataacccattgaataaatggctcgcaggctatgccgcagggatcggctacgcccagttcggcggcgatttcatgcagcgtttcattggttgcggccggtacgatgcgatccaccatggtattggggaaagtgacgttctggcggatccattcggccagttccggatcgcgaacggcggcgaggctcagtaccgtactgcgagccacatcgccattttctggaatgttatcgcaagaaagtacggtgaaaggcggcaaaccgcgtaaacgacgcaggcgcagcgcttcaaccagcacgccgggtgcagaggttggcgcttccggtacggccagatcggcctgaaccatcggatgattgagatctaactgaccgctgccgggttcaatgcagtagcctttttcagtgatagtcagggagacaatggcgacctggggttcagccaatttatccaacaccgccatgataccgtctaaacgggcatgcagagattcgcgtactgcgccaaccactatggcctgattgccttcggcacctttttccagcacggaatacagatggtcttgcttacgtaagtcctgaatcagggtatccccgccgaacagactgacttcacaaatcccccagtcaccgcccagctgattcagcacccgatcggtcaataacgcctgatgagcgcgatggaaggcaccgaaacccaggtgaacgatacggcttttcaactggctacgatcgtaagtcggaaggcggacggcgccgggaagcgggctattggcaagggtcttcatacataagctccagaatggtttaccttcccaaatgttcgcctgagcgtctgggaaccggtatcaaatataggcaagctggaaaggtgttggaccagtttggtaagtctgcttctctgggctaaccctctctatcagggagaggtttttccgctgcttgtcatgattagcggcttgcagtgtaaagcgatatgatagaaattaaaattggttagtccaaaattggtcatattcgtgaggtggatcaaccaatatacttttgctttttgacactttttcactaaagagtaaggttaaagctgagtgatatctattgataatcggtataacaacatttcggtaaaaggttagatacgtgaaattatgaccgcttggataccggattgagctttagatgatgaataaccgtgaaaaagaagacagtttgactcccgcatcgcagttattgccgatggtgcagtaacacggggtaattcaatgatgacaatgacgcaggtgagaaggtaaagcagatggaacaaacatggcgttggtatggcccgaatgacccagtttcgctggatgacatccgtcaggctggggcaacaggcgtagtaactgcactgcaccatattccaaacggcgaagtgtggccggtggaagaaattaaacaacgtcaggcagaactggcggcgaaaagtctggtgtggtcggtagtagaaagtgtgccggtacatgaagagatcaaaactcattcaggtgaagtcgataggcacattgccaactaccagcagacgctgcggaatctggctgcctgcggtatcgataccgtgtgttacaacttcatgccggtgctggactggactcgtaccgatctggaatacacgctgccagacggttctaaagcgctgcgttttgaccagattgcctttgtaaccttcgaactacacattctgaaacgtccgggcgcggctaaagactatacggcggaagaacaggcgcaggcagcggattatttcgattcgatgaccgaggcggaaattgcccggctgaccggcaatattattgcgggtctaccgggagccgaagaaggctatactctggaccagttccgcgctcgtctggctgaatacgacggcatcgacaaagccaaattgcgtgagaatatggcctatttcctgcgtgcaattgtgccggtggcggagcaggtaggtttacgtatggcggtgcatccggacgatcctccgcgtccgattcttggcctgccgcgcattgtttccaccattgaagatatgcagtggctgaaagagaccgtagacagtattcacaacggttttaccatgtgcaccggttcctacggcgtgcgggcggataacgatctggtcaagatgatcgaaacctttggcgatcgcattcatttcacgcatttgcgttcaacctgtcgtgaaggtaatccgaaaaccttccacgaaggcggacatttgcagggcgacgtagatatgtatgaagtcgtgaaggcgattctgacggaagaacagcgccgtcagcgagcaggggatcggcgtcctattccgatgcgtccggatcacggccaccaaatgctggatgatttgcacaagaaaaccaatccgggctactcggcaattgggcgtttgaaaggtttggctgaagtgcgcggcttagagttagcgctgaagcgagcgtttttccctgaattgcgttaattcagtgaaatgatggttagtggaataatgatggttaagggccggttttaccggctcttaacgttgaatcagcaaagattaatctgcgcgccccatataacggcgttctgcgatatgaatgcggattttctcacccgggctgatgtactcgggcacctgaattgacaggccggtactcatgattgccggtttgttacgagcactggctgaagcgcccttgatgctcggcgcggtttccacaatttccatatcgaccgtctgcggcaattcgagcgccagcaactggccttccatcgtcaatacttgcattcccggcataccaccttcaggaataaacagcagttcttcttcgatctgctcttttttgaagttgtacggcgtatagtcttcttcatccataaagacatattcgtcgccgtcaatataagagaagttgaccgcgcggcgggttagagtgatggtgtcgagaatatcatcgcccttaaaacgctcttccactttcaaaccggtacgcacgtctgaaaaacgcattttgtataaagtactcgcaccacgggcgcttgggctttgtacatcaatatctttcaccaacagcaatttgccgttgtagttgactgccataccgcgcttaatttcgttagctcttgccataaaaataacctgccaatcaggattgaagataagttgcgacaaattacccgtgctgcgggctacaggcaagcagatagcgtaaaaagaatgaggaaaaagcgcgaaaacctggcttggaacaagcaatgattcgatggcggattattgcgggaaaaagaatgtgccgccggagaggaattggcccggcggcgcagaagattggaacctattgatagaccggcagtaagcccattaatgcacagatatgagccacggcgttaatcaggccaaaggcgatgataaagccgatcatcaggctgccgcccggtgctcggtaagtggcctgcgggaagcggcggcgagttgcgcgcgccatcagtgccggaacaataacggcccaaatagtggcggccagaccggcaaaaccaatggcgtacaggaaaccattcggaaacagtaaggcaccgatggtgggtggcacaaaggtcactaacgctgattttgcccggccaatgccgtcatcggcgaatttaaagaaatcggcgatatagtcgaacagtcccagtgataccccgaggaaggaactggccagcgccatataggagaaggcattcagcaattgaccggtcaatgggcctgcggaaaccgtatccatctgttttaacaggctgccaatgttgccgccgtcggcaatcaccagtttgaaagcatcgcgcgcgatgttgccctgaatcacatactgccacaggatataaatcgccagagcaatcagcgtgccgaataacagactgcgcaccacggatttactgtctttgcgataatacttcaccaaaccgggcacgttgccgtgatagccaaatgaggtcagcagataaggcagagccgcgagcgcgtagggcagatagctggcgtcgctttggctatggttaaacagtacgtcggcttttacatgggtatacatatcaccaacggacataacgaatgtgattaccatcccgccaatcaatatggtactcaaacggtctaccgcgcgagtagataaccaaacgataaaggccaccagcaccgcgaagactaagcctgacgtggtttgccccacgccgataatgccgtccagagtgtgggcgataatggagccacccgccgagatataggcgtaagtcaggatatacagcacaaaggtaatggacaggccgttgattgagctccacatgcgccccagcaagtcctgcaccaccgtatggaaactggcgccagtcgggtagttgaggttagcttccaggatcatcaggccggaaatcagcatacatgcccaagtgtagatcagcagcgcgacagaaccgctaaaccaaacgccggcggtcacgataggaatagagaacattcctgcgccgacggcggtacctgctacgatcatcgcgccgccgagaaccgacggacgggatagggactgagtagagtccattgacatgcattgctcctgaaagacccgctgagggtaaggttcttttgtactagctcaatggtacagtggtggcggggcgctgtaaatagctgaatatacttagactgaataattagccggttaatacttcggccatcagcgtcattaatatcgctatatgatgcttatagtttagactttggttaaataatcgacaggtcgattgagtgattcatctcagttattgaggcggaatcatccgggggaaggatagtgctggtagttattgacggcgattgctattgtccgccatctactctgccagcccaccggagaatcactgatggactgtcgctcagattgcggtgcttgttgtattgccccctcgatttccagccccattccgggtatgcctttcggcaaatctgccaatacccgttgtattcatttagccattgatatgcgttgcgccattttccactctccgcagcggcctaaagtgtgtgccagcctgcaggctcgacgggatatgtgttttacccaccgcgatgaggctttggtgtatctgattcagttggaagccgccaccgcgccataatgggcaatagcgcctggttttgggcataaaaaaggcgatattgaatatcgcctttcatgttttatctgcggagccagaggtacatcctctggcttcatgttgtcaccattaagcgccttctggcaccgcatgtgcggtattttttagcacctgaccggtatatttctcaatttccaactgcgccatctggccacagttaccctgagccagactggatgagccgatatcgaaagtcaggcagttgatattgccgtttttacagatagagcccggttccgccggttctgccggatcgaaccacgctccctcactgacgcgaatcacgcccggacgaacgtcttcggtcaccactgcgcccaccaggatctgaccgcgatcgttaaaggcacgaaccagatcgccgttggtaataccgcgtgcgctagcatcctgcgggttgatcagaatagcttcacgatcggctaccgcatattttttccgcagcggggtgttatccaactgggagtgcaaccggttgatcggatgagcggtattgagcgacaacgggtattttttcgcttccggcccgcgataccactcgtatggcggcatccaggtaggaattccccgacaatcggcataacccattttggcaatggtatctgaataaatctcgatcttgccggatggcgtccccagcgggtttaacagtggattttcccgataatcggcaaaacgaatccattgtttattggcctctggaatcgggaagcgaacgtagttattcgactgccagaacatatcaaacggcggcagagcgactcgcgccgttctggcctgagatttcatatcgtcgtacatggatttgagccactgggtttcgtctttgccgtcggtaaaggcatcgagaacgcccagtctggcggccatggcagcgaagatatcaaaatcgttacgagattcatgctgcggcggtacgcattgatgcatcgggaaaacatacagttgcgagtaatcgccgcccatttccagatcgttacgttcgtagctggtggtggcaggtagcacgatgtcggcgtacttggcggttgcggtccagtaaggttcgttcaccacgatggtttccggatgctgccaggctttgatcagcttattggtatcctgatgctggtggaaggtgttaccgccagccacgtagaccattttcacatcgggataagttaccttggtgccattaaaatcaatggttttacctggattagccagacattccgcaatacgcgccaccggaattggagccggtgagttcttcggcgcattaccggcggaaatccccggtaaaatgccgcctttggccgttgggctaccgccggaagagtagtgatagctgaaaccgaacccgccgcccggcaggccgatttggccgagcattgccgccacggtcaccagcaaccagtgctgttgttctccgtgatgctgacgctgaatgccccagccgcccatgatcatggtgcgctgtttggccatatcccgcgctagctgacgcagaacttcagcatctacgccactgatatcagcggcccattcggcatttttcggttgaccgtcattttcacctaacaggtaggactggaatttatcaaagccgacggtgtaggtcttaacgaagtccgggtcatacaatttttcagtcaataaggtatgggcgataccgatcagcatcgcgctatcggtataagggcgcggagcgatccattgagcgttagtgaatttggcgctgtcgttatacaccggatcgatgctgataactttggtgccttttttcttcagcgcttcaaaaccggtctggcccacgtgatccggaatgttccagctattttttagcgtgatcatcgggttacaaccccacaggatcactagctcgctgttttctaccacgtttggccaggcggtttgctgctcgtaaacctccatagagccgacgacgtgggacataatcacttgcgcggcgccggtagaatagtcaccggcatagccgaggaaaccgccggtcaggttcatcaggcgttgtaacagggtgcggctgttgtgcagcattcccacgcttttccagccgtaagaaccggcgtacagtgcctgcgggccgtgatctttctgtacgcgggtaatttcgccacacaccagttcaatcgctttatcccaactgacacgaacccactcatcgcggccacgtagctcagtacggctacccggcccgccttccagccagcttttacgcaccataggatatttgatgcggttttccgcgtgcacctgataaggtgccatggtgatcagatcgttagggtagggatcgtcttttaccggctgaacggcgaccatacggccattttcgacaatagcttcaaacgcaccccagtgagcgccggtcagaatgcctttctgtgcctggcgcaatgccaaaaattgaggcaacgcctggctaatagcctctgccagcgcagatttaggccacaggccggccactaaaggtaacgccgctaacgcgctggtgcccatcaggaaacggcggcggctcatttgtaacggtttttgttcgtatttgctcattttcgcctctcgtttacgacttggccggcatatcactggcatgtttttgtacgtattgtgtcagtacgcgtagctgttcctgagtcagggaagtacgcggtgccatgcctttaatcacgccaatccactggttagcattgaaacgatccagtgcagtcaaaccgtggcaaccggtgcagttggaagacatcatatcggcggcgtagcgccagattttttgttgatcgtcaaccagctgtttcttcggtaaccagacttgtagcgccacctgatgccagatcagaccggtttcagcatcggtttgtgaggacgtggttttcagcgctttctgcgcttcttcgcccagtaatacgctgaggatgcgtttaccctgagcagcgtagaagacttccgctacgccatcttgctgccagccttccacgtcgactagcacctgatcgccttgctgtttcacgaccttaacttcggtagatggcatcagattaccggcgttatggctgtcacccgcctgcataaagaaaggttcggtggcaatggtgtataacgtggttgcgtcagccggtgtttgtgctgcggcggtggctagctcggcagccccagcttgagtcagctcgctcatatccggcaggatgtgggccacgcctttgtggcaatcaatacaggtttccccgtttttgatggcgaccggatgctgaacgcgggcttcagcactttgcgcggtgatgtccatggcgtcataattatggcaggagcggcaggtggcggagtcgttctctttgagggttttccacaccgattgcgccatcgccagcttatgggcttcgtacttctctggcgtgctgatggtcccgaccatttcgccgtagatatctttcaccgcccggattttagtccacaggtaatccagtggctcatggggaacgtggcaatcagcacattcggcgcggatgcctttcgggttctggaagtggacgctgccctgatactcggccaaaggctgctgcatggtatggcaggaaacgcagaaggtagtatcactggttttatggaaaacggtggcagtaccagccagaagtgcagcgccaagaatgatgccgatcagtaatagccatagccatccccaccgacgtcgtttaccgagttcagtctgttttttgctcatattacacccatgttatgtgtctaattgttttggtaacgctagattggcgaacgttgggcaagacaaaatccgttgcccataaaaatagtgcgtctattgtaaatggattttttgctgaaaactaaccagatagaggtatttgcaagattagatcaaatttgctgagtataaatacaggaaacgcacaattttttaccaagcatagacaataaatacttgaaatgcttggttatataactttttatatagcgctattttttagttggaagaggtataaaaacggcgagttaaccagagatgaatggcatttttacttgcctcaaagtgtggttcgggcagttcattgggggggcaccaaatccattggctacatttctccggctctttattttccacctcgccgccgggatactcggccagtaaacataccgaaaccgtatgtttgccttcggcctgccaggtggcgatattattggtcagagcaataacctgtggctgctgaatcagcagaccggtttcttcagccacttcccgctgcgcgcactgttcaaaggattcaccagcctctacatgcccgccgggaatcgaccagtagggtgcatgcttaccgcagcgttttcccagtaataccgaaccttgagggttaactatgatgacgccaacgcccacaaccacagccatattttttctccatcagcaaatcgtcagcaaagtatgccatttctgccttaaaccctaccagtgaaagcgtctccagaggtaaaatgtgcgtgacatcaaaaatctgctatgacaattcgaagaaaacttgcataaacccaaatgtagaaacacactattgaaacgtttcagcgttatctgcttcactgggtgataaagggtaacgctcctttttctcataaaagctgaaacgattcaatttcagtaagagaggagacttatgttccagttgtcactgaaggatatccatttggctgccaacgcggccgataaaaacgaagccatcaagcaggtagccgcagcgctgaccgacgccggttgtgtcgatgccgcctatgttgatgggatgctacagcgcgagctgcaaacttctacttacttgggtaacggtatcgccattcctcacggcaccaccgatacccgcgatctggtgcgcaacacaggcgtgcaggtatttcagtttccgcagggtatcgcttggggcgaagatcaaaccgcttatatcgtcataggtatcgcggcgcgttccgatgagcatctggcgctgctacgccagctgactcacgtactgagtgacgatacggtagcggctcagttggcaaaaacgacctcaccagaggaattgtgcagcctgttgatgggtgagaaaaaagcggctgaattccatttcgatacttcattaatcgccctggacatagcggcagataacctgattacccttcaggcgctgaacgccggtcgtttacagcaaattggtgcggttgatgccagcttcgttagcgatgtgattactcgttcgccgctgaatctggggcaggggatctggctgagcgacagcagcgaaggcaatctggtcagtgcggcaaccctcagccgtccggcggtgccttttgagcataacggtgaaaaagtggcgctgttgctgacgctgtccgtagccgaccaacagccgctgaacatgctgaattatttaagtgatttactgttggcgaaaaaagctgacgccttgctgaacgccgatgccgccaccgtgctggcattgctgaccagcgaatatgtagaacagagtcaggtgttaagcgcggagtttgtcatccgcaacgaacatgggctgcatgcgcgcccagggacaatgttagtgaatacaatcaaacagtttaccagtgaaattaccgttaccaatctggacggcacaggtaaaccggcaaatggacgtagtctgatgaaagttgtggcattgggtgtgaaaaaagggaatcgtctgcgctttaccgccagcggtgaagatgcgcaggctgcgctggatgccattggcaccgcgatctcagccggtcttggggagggcgcagcatgagcagaagagtcgcgactatcaccctaaatccagcctacgacctggtcggtttttgcccagaaattgaacgtggcgaagtgaatctggtaaaaactgccggtctgcacgccgccggtaaaggcattaacgttgccaaggtactgaaagatttaggtatcgacgttaccgtgggcggtttcctcggtaaagacaatcaggatggattccagcatttattcagcaatttaggtatcgctaaccgttttcaggtagtgccggggcgtacccgtattaatgtaaaactgaccgaaaaagacggcgaagtgacagatttcaacttctccggtttcgacgttagcaagcaggattgggatcgttttgtggtggattccctgagctggctgggtcagttcgatatggttgccgtaagcggtagcctgccagcaggcgttaatcccgatgattttaccgattggatgtcgcgcctgcgcagccagtgtccgtgcattatttttgatagcagccgcgaagcgctggttgccggtttgaaagcgtcgccgtggttggtgaaacctaaccgccgcgagttggaaatctgggccggtcgtccgttgcccgctttatctgacgtcgtcgaggccgcacatgccttgcgcgatcagggaattgctcacgtggtgatttctctgggtgcggaaggggcgctgtgggtgaatgcttccggagcctggttggccaagccgcctgcctgtgaagtggttagcaccgtgggtgccggtgactctatggtgggcggtttgatctatggcctgctgatgcgcgaatccagtgaacatacgctgcgattggcaacggcagttgctgctttggccgtcagccagagcaacgttggcgttaccgatcgtccgcagttggccgcaatgatggctcgtgtggatctgaaaccttttaattgatattcggaggcgaaatgaaaacgctactgatactagacagcgcgcatggacaggccagcggccatctggcgacgttaatgctgggcgccgcggccagcaaagccggtcttacatgggttgataaagcggaagacgcggagctggtgattgttaccggttcggcaataccggccgacggcgcattaaacggcaaaaaagtgtatctcggcgacctggctaaagcggttcgcgatccggatgcttttctggcagatgccattgcaaaagcgcaaccttatcaggctagcgttgaagctcctgcggcagcatcagccaaagggccaaaacgtattgtggcggttactgcctgtccaaccggcgtggcgcacacctttatggctgctgaagctattgaaagtgaagctaaaaaacgcggctggtgggtgaaggtcgaaacccgtggctccgtaggcgctggcaatgcgattacgccggaggaagtggcggcggctgatttagtgattgtggcagccgatattgaagtggatctggataaatttgccggtaaaccgatgtatcgcacttctaccggtctggcgttgaagaaaaccgtgcaggaattggataaagctttggttgaggctgaagtgtatcagccgaaatctgccggtagcgccaataccggcgtgaaaaaatctgagggcggtggtgcttatcgccacctgttgaccggtgtttcttacatgctgccgatggtggttgccggtggtttgtgtatcgcgctgtccttcgtattcggtattaaagcctttgaagaaaaagggacgttggctgcggccctgatgcaaatcggtggtggctctgcctttgccctgatggtgccggtattggccggttttattgccttctccatcgctgaccgcccaggtttaacgccgggtctgataggcgggatgctggccgtcagcactggcgccggtttcctcggtgggattatcgccggtttcctcgccggttatgtggctaaagccatcagtaccaaactgcgtttaccgcaaagtatggaggcgcttaagccgatactgattatcccactggtggccagcctgatagttggtttagtgatgatttatgtggtcggtacgccggtggcaaaaatcatgagtggcctgactgcctggctgcaatccatggggacggccaatgcggtgctgctgggagccattctgggtgccatgatgtgtaccgatatgggggggccggtgaacaaagccgcttacgcctttggtgtagcactgctgagctcgtcagtttatgcaccaatggctgccatcatggcagcgggaatggtgccaccactggcaatgggtctggcaactctgctggcacgtcataagttcgacaaaggccagcaggaagggggcaaagcggcgctggtactgggtctgtgctttatctctgaaggtgcgattcccttcgccgctcgcgacccaatgcgtgtgttgccgtgctgtatcgctggtggcgcgctgaccggtgcactttctatggcattcggcgcacaactgatggcacctcacggtggtctgttcgtgctgctgatccctggggcgattcatccggtactgctgtatctggtggcgatcatcgccggtactgttttggccggtggcttgtacgcgatgctgaaacgccctgatgctgcattggtgaaagtggcttaatgcattattagcaacacttaaatagcattaaaataaattatcgataccagtcagttaaccctgactggtatttttttattggaaatatagagttttatatttcagacggttaatttgttactggcccatttattaactcgccgtatgtattgttagtcgaataataaatctgactttgttcagtgtttttgacgtttgatcagaagaatcgcagcccaattcgttatacctcatcacttatttcgtcaccttactacgttttgtttaataaggagggcgggatgaatggctctattgtgttaaacaagcgttagaatttgctgaccattaatgatgaataatacgtcttatcaataaataaggtgttattaccggaacacctgtatcaccgcgccgatgacgtgatttcccgcgatgatctgctcagtacttgccggctggatcgcgtggtttcgccggtattttttccgggtaccatcaaacatattcgcgatgtattgcgcaaaactacctaggctgaagtcattacccaggctgaagtaataaagacgcataaaaggggagagaaagtctatttgagtggattatcggatagcgggcagctgcaatggggtaagaatgccagccagcagtattgggggagcggctctcaacggcgaaaaaggcgctgccgagctgtatctactcagtggagcttgccactacagcaaaatgcccgtcggggttaaacccgcaggcatactttagataatggtgatgactagatttcttcctgtgatttcagccaggcgatttcttccggccagatatccgggttaacggtttccagaatcagcggaatattgtcaaaacgcggatcgcgcataatgtagctgaagacggttttcccgatgttaccttcgcccagactgtggtggcggtcgacccgactgttaaattcgcttttggcatcattcaaatgcattccacgtaaatattcgaaaccgacgatctcacccagcgcggcaaaagtattctgacagtcttcttctgtacgcaaatcatagccagcggcaaaggcgtggcaggtatcaatacatacgccgacgcggcttttatcttctacaccgtcgataatggcggccagatgttcaaatttgaacccgagattactgccctgaccagcggtgttctcgatgacggcagccacgccctgagttgcatccagcgcgatattgatcgattcggcaatgcgcgccagacagcggtcttcatcgatttgcattaaatggctaccggggtgaaagttcagcaaggtcagccccagttgctgacagcgcgtcagctcgtcgatgaaggcttcgcgagatttctccagcgcttccgtgaccgggtggccaaggttaatcaggtaactgtcgtgaggcaaaatatgggcgggactgtagttaaatttctcacaggctcgtttgaatttttcaatcacatcttcaggaagcggagctgcacgccattggcgctgatttttagtaaacagggcaaatgcggtagccccgatttcgttcgcccgaatgacggcttgatctacgccgcccgcagcgctgacatgtgcaccgacaaatttcattcaattctcctttaatcactcgctcattatgacattgataacgacttgattgaatggctgaaggcagattgcggataaaggaataaaaaaccctctgccgaagaccggcagagggtaggatgtgacttcaatggggaaatcagccaagccaatgttgaaccaacagattaatgccaccgccgccgataatcagccagacaaacagcatgagcgccagtaataaaggcttcattccagcctgacgaatcgagccgatatgcgtggtcaaccctagcgcggccatggccattgccagcaaaatagtgtccagcgtaatcaaatggctaacgacggtttctggcagtaaatgcagcgaattgaaaccggccatggcgatgaaaatcaccgcaaaccacggaatggtaatggcacttttttgattctgcgaaccggattctggctggcgactgcggctgagataggctgacagcacgagcaggaaaggagccagcatcataacgcgaatcattttggtgatgactgcggcattttccgcatccgagccgatagcatggccagccgcgacgacctgagccacttcatgaatagttgaaccggcaaaaatcccaaaggtttcctgaccgatcggtagccattggtagtgcagatttagctgataaaaccacggataaatgaaaatgcacaaagtaccgaagatcaccacggttgcgaccgccaccgccactttactggcatcggcttttagcaccggttcggttgccatcaccgccgcagcgccgcaaatactgctaccggcaccaatcagcatcacggtttgctgatccagcccgaaaactttacgacccagccagcaagccagcaggaaggtggagcttaacgtcatcagatcgataagcatgccggttgcacctacgtcagcgacttgctggaaggtcagacgaaagccatacaaaatgatacccagacgtaaaagttgttgttttgccaacagcacgcccggtgaacaagaaggttgtagccagggatacagggtattgcccactaaaataccgaacaatatggctaacgtgagcgcccctaatcccagattgataaaccacggcatatcgcccacgtgaatcgcggcggcggtcagtgctccggttagtaccaatccgggaacaaaacgcatcagtgccgcgggctgcggccgttgtagagtctgaatctggtgagttgccatcgttatctcctacatcctgtaaacacgccgagatagtacaggatgtcagaagattagataaattgattatatggttataacttatttgtataagtggtaaggcgcgcgtttttcaaccggaaaatagataagccgaagtggcctaccccagtttgagcgctttcgttgattaattatcctattgatagagtgtcaactgcggctcgggcgtgagtccccatgcctttggtcgaatgtttgtcggttcatactttttccgaatatataatcaaaaaaatggttacgacctactatcgccttactgtttatgcgtgaaaataaattcgctggtatactgagcattgtaattagaggtttaacgtttgaatgaaaaatactaaaaaatatgaaaaatcgctgctggcaattatgttgttcacggcagtgttatatcttttgatgcctcctgcgcttatcgcctattttttcggactctataatctgaatcctttttcaattggcaacctgccgcatttcaatccgtttaacaccgaacgtgggttgccgctgcaccaaatctactgttatctgctgctagcctggctgttgctgaatggtctgataattttggttatcaacttaattcatctggttttttttcgatctggtgatgatgaataaccactgcattagcatttatcagtattttattcggcaatacccggcgcttttctataaaggtgttacccttaatacgataattatcagcggtaatacggcactaactcgtagccacgcatctttataacattgtaaattatagggttgtgttaaaacgcggcgttcaaagccagcgtattgagggcagggctgccaatttcaattacagagactgttatgcatatcaccttgcgtcagcttgaagtatttactgaggtattgaaaagtggttctacgacccaggcttcggtggttttggcattgtcacaatctgctgttagcgctgcgttagctgatttagaaggtcaattaggcgtgcaattgttcgaccgggtggggaaacgcctggtgataaacgagcatgggcgcctgctctatcctaaggctgtagccttattagagcagaccagtgagatagaagaactcttccgacaggatgttgggtcactccgcatcgctgccagtagcaccattggcaattatatgctgcccgctatgttggcgcgctatcgtcatgattttcctgcaactccgttagaactgaatattggcaacagcctggatgtcattaccgccgtggctgatttccgtagcgatcttggactgatcgaagggccgtgccatatgcctgaattggtcacccaaacctggctcagtgacgagctggtggtgtttgcttctccagataatccattgtgccataagccgattacgttggatgaactggctgacgccgtatggattttgcgtgagcgaggttcgggaacgcgtgaggtgttggatcacttgctgctgacccatttgccacacttcactttactgatggaattgggcaattcggaagcgataaagcatgcggtgcgctatggcatgggcattagctgtctttcccgacgagtcatcgccgagcagctcgcgaacggcagtttggtggagatatcactgccgctaccgccgttggtgcggacgctatatctggttcatcatcggcaaaagcatctgtccaacgcgctgcaacgtttcctgagttactgtactgagacagagtaatcccgatttcgggttatggatattccagaggttcccccgtgattgtgttgatattttagacaaaaccgcctttttcattaggatttcactaataatctgatggcgatcatgaaggtatcttatatcagcgcattcagactacccacgctggcgggatttgttacaattccgcctcgtttttttcagggcagattaggtaagaatggctcagacagataataaaatccccgtgcagcatggcgcgcagagattacgccgcgagctgaaatcgcggcatttagccatgatcgctatcggtggctctattggtaccggcctgtttgtcgcctcgggcgctacggtttcgcaggcagggccaggcggagcattgctctcgtacgcactgatcggcttgatggtgtatttcctgatgaccagcctgggcgaattagctgcctttatgccggtttcaggctcattttccacctacggttccaaatatgtagaagaaggtttcggcttcgcgctgggctggaactattggtataactgggcggtcactatcgccgtggatctggttgcggcgcagttagtcatgaactattggttcccggaaactcccggatggatctggagcgcactgttcctggggctgatgttcctgctgaattacatttccgttaaaggttttggcgaagcggaatattggttctcactgattaaagtcactacggttatcgtgttcatcatcatcggcgtactgatgattgtgggcatcatgaaaggtggtgaaagtgcgggttggcacaactggacgattggcgatgcaccgtttgccggtggcttctctgcgatgattggcgtggcgatgattgtcggtttctctttccagggcaccgaattgatcggtattgctgccggtgaatcgaaagatccgggtaaaaatatcccgagagccattcgcaaagtgttctggcgtattctgctgttctatattctggcaattctgattatcagcctcattattccttataccgatccgaacctgttgcgcaacgatgtcaaagacatcagcgtcagtccgttcactctggtattccagaacgccggcctgctatccgctgcggcggtgatgaatgcggtcattctgacggcggtattgtctgcgggtaactcgggtatgtacgcttcgacccgtatgctgttcacgttggcctcggaaggtaaagcgccgcgtatcttcgccaaactgtccaaaggcggtgtgccgcgtaacgcgctgtatgccaccacggtggtcgctggtttgtgcttcctgagctcaatgttcggtaaccaaacggtttatctgtggttactgaatacttcaggtatgaccggctttatcgcttggttggggattgctatcagtcattaccgtttccgtcgcggttatatgaagcagggccgtgatcttaacgatttgccataccagtccgggtttttcccgctggggccaattttcgccttcgtgctgtgcctgattatcactctgggccagaactatcaggcgttcctgcaagatcgcatcgactggtacggcgtgaccgcaacctatatcggcattccactgttcctggttatctggtttggctacaagctgactcgtggaaccaaagtagtaaaatacgatgaaatggaattcccgaaatggaaagatgaacattaaggtttattgtttgcttcgctgaaagcgttcggcaatataaattaatgtgatagaagggcgattatttaatcgcccttttttaatgggaataattctcaccttattgtttttatgaaatcttgggcaaaaattttcgtgaagattggtcggatctgtttatttaagctgacggaaatgaaacgggtaggttaatttatttttataaaataggtatttacaaaagattacattcaataacctttagcaatcttattgataagtattatcgtttgttttattgttagcgccatcttataaagacgaccaaggatatctgcgtgaaatctgtatcacggaaaatggctaaaggtgtaagtatcagtcttttgatgggcagcacattaatggcgggttttagcgcctgggctgaaaatattactgatatggcagggcgttcggtagaaattccggccaaagtcgatcgcattttattaggtgaaggacgcttattctacgcagtctctctgctggaaggcaaaaagcccttcgaccgaattgtcggctggcagggtgacttccgtaaactggatacccaaacctacgccgtttataaagccaaattcccgcaggttgataatattccgttgataggcaataccactgccgacagtatcagcccggaaaaagtcctgacgctgaatcccgatatcgctatttttggtttatctggtcacggaccgggtaaaaacagcgaattggtcaaccagttagagaaagccggtgtgccggtggtgttcgttgatttccgcacttctccgctgaaaaataccctgccaagtatgcgtgtattggggaaagtgttgcaccgcgaacagcaagccaatgattacatcaaattctatgaagataatgtccgtaaagtgactgacattaccaacaccgttcccgccgagaaaaaaccaagcgtgttcatcgagctgcgtgctggcgcgatggaagagtgctgcggcactgccggtaaaggtaacatgggtgactttatcgatcaggccggcggtaataacatcgctaaaaacctgctgccgggagcactgggtacggtaaatctggagaaagtgctttcggctaatcctgatatctatattgctagtggtggtaaagcgccggacaataacgcaccgggcatatctttgggggcgcaagtaacccaagaacaggctcaggcaagtctgcaaaagattctggatcgtaaaggcatcaataccctaagtgcggtaaaagaggggcgaagctacggtatctggcacaatttctacaactctccttataacgttttagcgattcagagttttgctaaatggttctatccggaacaatttgccgacctcgatccaaataaaaccatggacagcctgtattctcagttcctggctattgagccaaccgggacatattgggttgattcaaagaaatagtctgtaacaggtaactgaaacaatgagtgtaactgcggaacccttaccaaaagtgaaaagtcagactgataccggcgtcatggggcgctatcaaaacatagtgcgccatcgattgttaattttggcggtattggctttggcaatcctcggctgcctgctgttggatttcaccatgggaccttccgggttatcactctcctccctgtggcagacgctggttgaccctgccagcgccgatgcgggcacccgagttatcgtgtgggatattcgtttgccttatgcattgatggcggtagtgatcgggctttccctcggtttggccggtgctgaaatgcaaaccatcctgaataacccgctggcgagtccctttactcttggggtttcctcagcggcggctttcggcgctgcgctggcgatagtctccggcattggcattccgggggttccggatcagtggtttatctcggttaacgcctttatctttgcgttgttcgcggcgttgatgctggacggcattacgcgttggacgcgggtggcgacctccggcgtggtgttatttggtatcgcgctggtattcacctttaacgcattggtttccatgatgcagttcatcgccagcgaagatacgctgcaagggctggtattctggaccatgggcagcctggcgcgagcctcttggaccaaactgggcattatgctcggcatttttgctctgatgttgcctctttccatgatgagttcatggaaactgaccgcgctgcgtttgggcgaagatcgcgccattagctttggtattgatgtgcgtcgcctgcgtttaggcactttgttgcgcatcagtatgttatcggctctggcggtggcattcgtcggcccgataggctttatcggtctggttgcaccgcacattgcccgtatgattttcggtgaagatcaccgcttttatctgccagccagcgccctgattggcgcattggtattgtctatggcttccgtcgcatcgaaaaacctgattccgggcgttattattcccgtcggcatcgttacatcgctggtgggcgtgccgttcttcctgagtattattttgcgccatcgggggaatgtatgaattcaggtttacgtattgagcattttaatgccggctatccaaaacgtccggttattcagaatctgagcgtacctttgctgccgcgtggcaagatcaccgtgttgctggggccaaacggcagcgggaagtccacgttattgcgttctttagccggtttgaaccgagcggaagggcagctatggctggatggtaaagatttgatgcaaatgccttttgcgcaacgagccgaacaagtggtgtatttgccgcagtcgttaccggccggcgtgcatttgcacgtattggaatcgattattgtcgcgcagcgggcgtccggtggccgtagtcatgccagcagcgaagcggaagtcatggcgttgctggagcaactgggtatttcccatctggctttaagttatctggatcaactttccggcggtcagaagcagttagtgggtttggctcagtcgttgatccgccagccatcgctgttattgctggatgaaccgctgagcgccttggatcttaactaccaattccacgttatggacctggtgcggcaggaaacccaaaagcgcaacattattaccgttgtggtggtgcacgatatcaatatcgctttgcgtcacggtgaccacgttttgatgttgcaaaacggtaatctgattgccgatggcgtaccggaagacgtgattactccagctagtctggcgaaggtgtatggcgttaaagggcgaattgaacgctgttcccaaggcacacctcaagtattaattgatggattagtcaccgaaccgacaatttaattatatattctcaccgccttattaaattatttcacataaataaggcggtgatattaagccgtgccccgaagttattataaaaataaaattcaagtggaaattccggaagcagtatttctgtttcaatgagcaatgactctaaatatataaaaataatatttatacatttcaatacctcatggagaatggtaatggcagtctttagcaaaacgaaaacagcggtattgattactgctgcgatattatctgcccaatcgcaggcagataataaaaataccgcatcgacagatactctggttgttaccgcaaccggtttccagcagcgtattcaggattcggccgcgtctatctctgtagtcacgcgtcaacagattgagaataaagcctatcgtgatgtgaccgatgcgttgaaagacgttcctggcgtagttgtcaccggcggcggcagtaaaactgatatcagcattcgtggtatggcggcgaaatatactctgattctggtgaacggtaaacgggtggatactcgcagtacgcgcccgaacagcgatggctccggtattgagcagggctggttaccaccgttatctgccattgagcgcattgaagtggtgcgcgggccgatgtcttccctgtatggctccgatgccatgggcggggttatcaacattattacccgtaaagttggcaaagagtggtccggttccctgcgtgcggatgccaccttgcaggaagattctaaatccggcgatatgttccagactaacgcctatgcctccggcccgttaatcgacggtttattaggattaaaagtcagcggtctgctttcacatcgcagcgaagataaaatcattgacggttataatgaacagagaatgcgtaatggtgctgcgacatttagtttaacaccggatgataaaaacgaatttgattttgaattgggtcattatgttcaagatagaaatgtgacgccgggttattctgtcaagaaaacagataaaaataacgacgttcagtatgaccgaaataactattctattacacataatggttattatgatttcggtaattcaaccagctatgttcaacgtgatgaaacgcgtaatccatcgcggaaaatgaaaagcgtcgataatgtctttaatacccaaacgtctttcctgctagataatcacacattaattctgggcggccaatatcgctttgaagaattgtatgatgacaataatcagctcagcacggctaaagatctcaagaaattaagccgctggagttgggcgctgtttgtcgaagacgaatggcaaatgaccaacgatttcgctctgaccggcggtattcgtatggatcaggatcagaactacgggactcactggacgccgcgcttgtatggtgtatggcatctggctgaggaatggacgctgaaaggcggcgtttctgctggttatcgctcacctgatttgcgtcaggcaacggataattggggacaattaacgggcggtggtaatggtgctccggcaataatcatggggaactccagcctaaaaccggaaaaaagcgtgagtgaagagattggcgtcctttgggataaccaggatgatctcaatgccggtattaccgtctttaatacccatttccgcgataaaataacggaaagtagacagtgtactgatgttgatgcaagtggcgaaccgagtggtgcggcttctggccagtgtagggtcaatggtgaaaacttccagtatatcaatgagcgtcttaacgttgatgaagcgaccatgcgcggcgttgaggcgacattcaattgggatatcagcaaggattggactttaggttctagctatacatttactcaatctaagcaaaaaagcggcaaattctctggtcaaccgttaaaccaaatgcctaaacatatggtaaacgctacgctggactggaaaacgagcgaagacctagcgacctggattcgggctaattaccgtagtaaaacctctgaatatctggatcgtaccaacctgaaaggccgcacgccgtcttatacctttgtagacctaggtgctaactataagctcactaaagaactccgtttaatgggcggtgtatacaacgtattggataagcgcgttgataccacggttagcgacaaagtgctggacggtcgtcgttatatggttggtgttaattacgatttctgattttttcttaattaaagcgattgatgaagccactgaaaagtggctttttttattcaatcttgtcgtgggggagcaggttgatgaatttctcgattttgcttccttcgtgctttttatggttttcaaaatatgaactttgaactttgaactttgaactttgaactttgaactttgaactttgaaatcggatcaggtttcagttgatatttgctttgtgaatatttcacttctacagcctcaaccaagtcaaagcgcgcaggcgcgagtcttaaccatccgcgcctccgcacaaagccgcttgctttacaggacacctcgttcatcacaccggctgacgggcgcctccctgctaatggcgtctcgctccgccgtccacggcgggttgccctatcctctgttcttcattcagcaggctgcgatgtgctcttatcttaaaggccgaattaaaaacacagaaaaccgaactataaagctttcaaaacatgatcctgcctgaattatcgaaaaccctcaccgcttttgtatatacgtcaacgccaacgctagcgccaaaaccaaccctttaataatatccattgcatagtaaggcactgaaagcatcaccaagccattttgcagcacgccgagaatcaccgcgccaatcagggtgccaaaggcgtttggtttgcctgagcctgccagtgaaaaaccgatataggccgcggccaccgcgtccatcaggtaaccgctaccggcgttaacctgtgaagaaccgatgcgggaagcgagcaaaatgccgcccaacgcagccagctgtgaggaaagcacataggccaaaacccgataacgaaccgtgcgaataccggacaaccgtgccgcttcaggattgccgccaatggcatacatacgacggccatgcttggttagcgatagataaagctgcaccactaatgtcacaatgagcataataatcacgatgacagggacttgccccaacgccgaaaacatctccggaatcagcccttcggccatatcgccactcggcaacagcatattctgggtgatagaaccgccgtagctgtaggtcatcgccacgccttgaatgacaaataagctggctagcgtcgccaacatatcggggatcttcagtaccacaatcaggaaagcgttaaacaacccgaccaaaccgcacaccagcaaagtcacaatgatagcgccggtggtaccgaagccgtaccagacaaacagcgacaccactactgcgttggccagtgaagcggtagagccaacggaaagatcgaaaccgccgatagatagtgatatcgatacgccgatggcgatcaccgtgacaatagcgatagatcgtaaaatattgatgatattgttcggatcaaggaagttatccgaagccagaccaaacagggcgatcaacgcaacaacggtaagtaacatcccccacttatacagaaaatcaaatagctgatgacgccagggctgcacattaggtaggggcgaatctttactcacgcgggtgttcctccggttgaaaatagtaatagcgtttcttcgttaatttctgcggcgttcagctcggccacgatgcgaccatcccacagcacgcaaattcggtcacataggcctaccagttcggagaattcacccgaggcatagataatgcctttgccctgacgcgccaaatcgtcgatcaggccgaatagttcctgtttggctttgatatcaacgcctttggtcggttcatcgaaaatcagtatctgtgcgtctccccgtagccatttaccgatagccactttttgttgattgcctccggagagtcgagccaatttctgctgcggcgcagaggtacgtatccctaagcgctgaatcagtgttttagcccagtttaattcctgtcggcggctgaaaatgctccagcgggagaaactgtcgtcggcgcatacactcagattcataggaatgctttcgtgaataaaaatgccttctttgcgccgttcttccggcaccagcgccaatccttgcgtcactgaacgatccggcgaatgcggttgccagcgctgaccacgtaattccgcctgtttcaccgtacagggcatcgcgccaaacagcgctttgcacaactcggtttttcctgcgcctgccaaaccggcaatgcctaaaatttccccttgatttagctggaggctgatatcgcgcagtttatgtggatcacgcaatccactgacgctcaaaagggttttatcgctgcagggcgggcggcggggagggaatatatcgtctagctgatgacccagcattttctcgacgatttgctcactgctcagcccggccatagcgccgtggctgataaatcgcccgtctcgcaacacggtaatctgatcgcaaatctcgcgtaattcatggatgcggtgagaaataaatacgatagcaataccttccgatttcaggcggcgtaccaccgtaaacagacgggcgctttcttcctgatccagcggagccgttggctcatccagaatcaaaaaacgacagtggtgggaaagggcgcgcgctagcagcacctgctgtttttctgccagggtgcaggattccaagcgctggcgaacgttcagcggtaaacccaattgttggagcaactgctcagcctgacgataaagccgcggccagttgaacaggtggcccgattctgccagcgttgccagcataatattttctgctaccgacaagcttggcaccaaagcaacatctacctcttgctgcaccacgtgaattccgagctgtttagcctgaagcggcgaatgaatatctacccgctgtccgtctatgaaaatttcaccactgtagtgaccgtgcgcaccggaaaggatcgccattagcgttgattttcccgctccgttggctcctaccagtgcatgggttgatccgccttccagcgagaaatcgacctgctgtaaggcatgaaaaccggaaaacgagagtgaaatattgcgcatttccaggcgagaaggggtgagggtaggcataagtttctgtaacggccccgctaaataggtgaataccgcccaatagttagctttatcggtggggtaataaaaacgtttcgtcaggcgaaaatcgtaaaaaaaacgtcaaaaaatgcgcttgttctcggtgttttttaacatgttttaaatcattagtaatgaactaatagggttaagctatagcaaataattattaaacatctttggcttagccattaagatgaatcagaccggacaggattaagacaggttagaaagtaataataatcgccgttgataacaactgaaaaaaaattcataacatcagcaaggaaatggcatgagtgcgaacacaatccgcgtgcaggtagggcctgccaactattattcttttaccggtgctatcgataagctgagtgaattctatccacagcccgtattggaaaaagcgctgtggatttatggtgaacgagcattaaacgccgcgcaggattatctgccagcggaatttcattccgccaatgctattaaggcgcgctttaacagccattgcagtgaatccaccgtggcagaactggtcagtgtggccggttccgagcgccaggtggtgatcggcgttggcggtggtggcgtcctggataccgctaaagtggtagcacgacgcttaggcctaccgctggtggtcattcctaccattgccgcgacctgcgccgcctggacgcctctatccgtgtggtataccgagcaggggcaggcgctgaattatgaaattttcaatgatgctaaccatttggttttggttgaaccgcgtattattttgcaggctcctgtggcctatctgctggccggtatcggcgataccttggctaaatggtatgaagccgttgtattaagcagcgatcctaaatccttaccgttgacggtgcgtctgggtctacaggcggcgctggatgtgcgtaatgttctattggaacagagcgaggcggcattgcaggcagtcgcgcggcgcgaattaacgcaggatttcctcgatgtagttgacgcaattattgccggtggcggcatggtggggggattaggcgagcgtttcacccgcgtggcggcggcgcatgcggtacacaacggattgacggtattgccgcaaaccgcacgtttcctgcatggaacaaaagtggcctacggaattctggtacaaaccgctttgctggggcaggaacaggcgttgaaagacctgattgctgcctttaaagtctggggcttaccaacccatctggccgcgctagacgtcaatattcgcgaccgtgatgccattgaacaagtgattacccgaattcttaagccgggagagtccatccacgcactgccaattagcctgaataaacagaaaatacgggcggcaattgagcaggtagacatcgctgcgcaggccttataaggcgtggtaagggctttttttcttcgcagagcgaaataaactggtttgggatggttttaacgtcttgtcttttcatctcggattagggcagaatacgcgccaagaaatagccgacgttttaaataactcgtcggttatttttttgcattcgtgttttcacaaatcaagaggccgggcatcgatccggatagataaataggtccgcgtgcgattattcacaccatgaaatcgccgttatgaggaaagaaagatggggcaattgttcactttagcgtcggtgcctaccggcatgcgctgcacacgcagcgattatggggcagcaggcattttttcaacccgctattccgctttcattaccccacttgcgtatcccaggcagatacgaagtttccccgtcacctctcgactttgtggtacaaacacaaatctggtcgaaggtatggggaggctgaatcatgtcgcttaatacagctgttcaggtcggcaccaatcagacaggcaccaacaatcgcgtccaactcagaaaaactctgacgttggttcaagtggttatgatggggcttgcttatctgcagccgatgaccatttttgatacttttggtattgtttcaggcttgaccgatggtcacgtcgcgacttcttacgccatcgctttgatcgcggttctctttaccgccgttagctatggcaaattggtgaaacgcttcccgtccgcgggctcggcctacacctacgcgcagaaatccattagcccacacgttggctttatggtgggttggtcgtcattgctggactatctgttcatgccaatgatcaacattctgctggcaaaaatttatctggaagccatcttccccggcgtgccttcgtggatcttcgttggggcgttggtcagcctgatgaccttgttcaacctgcgcggcatcaacgtggttgctaacctgaactccatcattgtggtggtacaggtagcgattatggtggtattcgtcgggctattgattcatggcgtttatcagggtgaaggtgcgggtacattagttagcaccaagccgttctattcagagaacgcccatttggtgccgatgataaccggtgcgacgatactctgtttctcattccttgggtttgacggtatcagctcattgtctgaagaaacgccaaatgccggcaaagtgattccgaaagccattttcctgacggcgttaatcggcggcattatctttatcgcggtatcttatttcttgcagttatatttcccggacatctcgcgcttcagcgatcctgatgcgtcacagccggaaatcatgctgttcgtggccggtaagttcttccagtctgtgattctgtgcttctcttgcgtcacggtactggcttcaggcatggcggcgcacgccggggtttcccgactgctgtacgtcatgggccgcgatggtgtattcccagagaaagtgttcggttacgtgcatccgaaatggcgtactccggccatcaatgtgctgttggtcggtggcgtagcgttgtctgcggtgtctttcgacctggttaccgcaacggcgttgattaactttggtgcgctggtggcgtttacctttgttaacctgtcggttatctcccagttctatatccgggagcgcctgaaccgtacccttaaggatcacatcaactacctgattctgccggtaattggtgcaggtaccgtcggcgtgctgtggatgaacctggaaagcagctcaatgaccttaggtctggtttggggggcgattggtctggcgtatatgctgtggaaaacccgtgttttccgtcaggcattaccgcagttcaatgaagaacttgcacgataataaaacttgattgatttgtgatgaaaagcggagccgattggctccgtttttttgtccgcaatctgcgggtaaaaagaattggccgttggaatagggcgaaatacgctgttttattatcagtgctgatctgcacgactcggcaacctgatgttcaatattggtgttatcggcggactgaatagcaccgccgggtaatcattttggcgagaagttaactcactaattcgcgagcataatcgtacaatgattttaatagctccaatttatctttatcactttcatacagattgtagaattgctccaattgctgcacatactcctgtacccgctcagggcttagcacttcgcggcgatggttaagccagcgctgctgctcgctgtcatccagagtattggggtagtttctggcgcgaaaacggaacagcaactcatccaaacgtcgatcctgaaaactcagatccagcgcaggcagattttgcggcgcagtttgctgaataatcttcattgccgctcgatcggcgtcactaaagaagccgtcataaagctgggcatccacatcgttggatgcagcaaaaggcggggcttcagcaaacagggcaactactttttcgcgtatctgcgggttttgtcgcaataattgcaaattttgcaggcaacgttggcgatcgatacctaaacgttcggcattctctgccagcagagttttcgctggagccagcactggacacttattgatatgcaccagtttgattggcacagacgattgattggcagaaagctggtctcgacgagtatataagcgttcacgcaaggcgtcggtatccagttccagcagcggcgacatatctccggccagatcgcacatgatgacggcgtttttgttatccgggtgccaggccagaggtgcaacccagctggtgttacctcgcgcagcaccaaacatgccggaaacgtgcaccagcggagtcatctcggcaatgtcgattaacgaattgattttatgcttattacgatgctgatagagataatcaaacaaccgaggttgcgcctgcttaaccagttttgccatcgcaatggtggcatgtacgtcagacatcgcgtcatgagcctgtaaatgttctacgccattggctttggtcagatgttccagtttaaagctcggcaggccgtcgtcattttccggccagataatgccttccggacgcaaggcataacatgcgcgcataacatccagtaaatcccaacgagaattaccattttgccagctgtaggcgtaaggatcgtagaagttgcgataaaagatattacggctgacttcatcatcaaatcgaatattgttgtaacccaaaatacaggttccgggcacgctaaaagcctgatgaatccgttgggaaaactcagcctcgttgacgcctttggccagcgcggtttgcggcgtaatgccggtaatcatcaccgcctcgggctgtggcagataatcgtccgccggagtgcaatacaccaccaatggctcttcgatgatattgaaatccagatcggttcgcacaccagcaaactgcgccggacgatccagcgctggatgttgaccaaaagtctcgtaatcatggacgtaaaacgtcggtgatgaggttggttttgccattcttttgtattgacctttattgactctggcttaggggctgagatttacccacggcagccactcactttgtaacaagaatatcatctcagcatagttttcacgtcagttttatcatcactaaaaccgaggggatctcgggttaccctagttagataagatgagaacgaccccgcatgtgaatcggaacataatgatatttatacttaaaaaaatattgaatcatttataaattaaataactttgactttaatgattcattaaacgagttatttaacttccgtttactcagccctttatacaatgctcgacataaaatacttaatagggtttgaaacggtgaaaacacttttattgaccggggcaacgggctttctgggcggggcagtgctggaaaagcttctgatagaaaattcggattttaattatttattattggttcgggctaatacaccagagcaaggcttagcccgtatcaaacataatttagaaaaattttatctttcgccccaaaatctgaataaagttacagaacgacatatattattaggtgatttggctgagccagaaagttttatttccgatcctcggttggatgaggttactcatgttatcaactgtgcggcggtagcctcttttggcaataatccgttaatctggaaggttaacgttgaaggcacactggcctttgccaaacgtatggctcaggtgacaggtttaaaacgctttgtacacgttggtacggcgatgtcttgtacgccggatgcaggaagtctggttgatgagcaggtattatctccggccagtgaggcgcatttagtcgaatacaccaaatccaaatcaaccattgaaaatctgctttcagaacaatgtcctgatttaccgctggtgttcgcccgaccgtctattgttgttggccatacccgcttaggctgccagccttccagcagtatattctgggtcttccgtatggcattaatgatgcggaagtttatgtgttctctggacgatcatattgacgttattcctgtcgattactgcgcagatgcattggtctgcttattattacatccagaattacctgactatatttatcatatctctgccggtgaagagaatagcgttagttttgccgaaatagataatgcgatgtctctggccgcgaaacaaaaaccagtgggaataaattatatgcaggttgattacggtgccttggtacaaatgcgtaatcagctgaaaaatatatttgggccttgtaatgaacgcttaatgctaaaagctatgcggttatatggctcattcgccatgctaaatgtgcgctttaataatcagcgattattgagtttgggaatggcaaagccgccgcgctttacggattatgtcgcctgttgcgtagagtccagccgcggtttaaccattcaggaacaaatggccatcgattttaaataaaattagtacaccttcttacccggcaacaacaattgccaagattgtcatattttatcatgtttggcggagtgccagatgttggttactccgctagaattagccctttcctgacgaatagggtgagtgtgctgtgcgccttgataaagcaattacgccactggataatttgatttatagcaattaccgtattgcccacgctttacgaattagcgtggcctttgtcctaacctttcttatcctgcgtttacttgccttcccggatgccacttgggcgctaattactttggtcgtggtgatggggccgctttcctattggggaaacgtcttttctcgcgctattcaacgtattggcggaactctctgcggggcagcttcgggtctggtcgcgctgtatcttcaacaatattctctaaccgctatgctcgcttggtgctttgtagtgatgtttgtctgcggttatttaaccttgggcaatcggccttatatggctttattgatcggtgtaaccttggcattagtttgcggttccggctcggtcgatatgagtaccgctctgtggcgcagcgccgatgttattttgggttctttactcgcgttgttatttactagcatttatccgcagcgggcttttacccattggcgtatgcaattaagcaccagcctccacgccatcggcactatctatgctgcttatttatcacctaatgtggtcgatcgtcctcgtttagaggacaaaatgaaaagcgagttagcgcgattggtcaaaatgcgcggttatatcgcttcggcgaccaaagaatcgggtattgataaagaggtatttaatgcgattcaaactctgtatcgcaatgtggtttctacgctggaactgttggccgatgcctattggtcgtctcgcgaaagccattttttactgctgaatgtccaaactctgcgccatactcagttgctaactattcgtactctggataatttaagtcagtgcctgctcagcggccagccggagtatgaggaggtcgccgccagcgaattgagtgagatcagcgtagaattggaaaaactgcttgaagttgctaccaaaaatcagcaaatcgaggcgcctatttatggctatgtgtggttgagcatagaaattacccgccaattgaaagaactgggcgatttgattgagatgaccatgcgacgctagccgattatttggacgcgaaaggcgatgaaatttctgtctgacgggtaaaaaaggtaagataagtcaatgaatcttgtctctgatggctgctaacctgtattgttaagatcgcgtgttgtcgcgacgtgatggtgaacagacaaccggccgtcagcaattgaatttgtgtaaaacttagctaaggtgtgaaaatggaaaatgtaagcaagccaactttccaggacgttttggagttcgtgcgtatgtttcgtcgcaaaaataaattgcagcgtgaaattgtcgataacgaaaagaaaattcgtgataaccaaaaacgcgttctgttgctcgataacttgggcgaatacatcaaacctggcatgagtattgaagacgtgcagggcattatcgctaacatgcgcagcgactatgaagatcgtgttgatgattacatcatcaaaaatgccgatctgtcgaaagaacgtcgtgaactgtcgaaaaaactgaaagcaatgggcgaagttaagtaacctgagcgatttagtttaaagattggagagccagattgatgtctggctctttttttatctattgaaagtgaatatccaaacccgcgagttaggaaaacctttgatttagcgtaatcatgggcataaataatcgccatttagcacatttgagcgatggcgttgttgggaatgcctggcaatgttatttgccggataattacattatttgcaatagcaaaaagcccgactaagtttccttaatcaggcttctttaatatggctcctctgactggactcgaaccagtgacatacggattaacagtccgccgttctaccgactgaactacagaggaatcgtgtgaacgaggcgaataatagcgagggcggacgggtttgtcaaagtagaaaaccattaaaaacgtgcgtttgctgagagaatgagcttattgtcttgtttttcagcaaaatcagctcgttatggtgcaagattatgctgttttatttcttttcccctttgcctgtaacaaaggggaatgaggttgataaggagaaataagaaagaacaacgcttaggctttacttctgcgcagtaatattcgtgggaaaagattatctaaaacccctttgccactgagagtgaaggccgaaagcagggtaaaactcagagcaatcgagccaagaatgaaataggtatggctgaaaccgatctggtcatacattttgcctgcaaaggccgagagaaatatcgccgctacctgtttggagaagcaaaaaccaattaaatagatggtggcggaaaatcgcacgtcaaatactgaggtaatgtatttgaaggaaccaatgagcaggaagggaacctcaaaagcgtgcagcatcttcaggcaaatcacttccagcggcgttgtggcgaaagccgagccaaaaatacggatcgacataaacatcccagccatcagtagcgcatttttgctaccaatgcggttaataatccagggtgcgcagaacatcagcagggcgttggccaattctccaagcgtggtgacatagccaaatatttcggtgccacgttgtttcgactcaaagaaggacttaaagaaattggcaaactgttgatcgaaaacgtcatagacgcaggcaacgccgatgatatacagaataaatagccacagcttgggcattttaaacagttcgccgaccattttcaggttaaatagcgattcgttggcgcctaattgattcattacttcggcggagcggtttttatgaggtttggctattaacagtaatgtggccaatatcagagcgctgcctgatcccatccaaaacaccaggtccggattgacgttaaacagtattccggcggtagaggcgcagattccccagccaaaacagccaaacatccgcgcttgtccgtattcaaatccgctggtacggctaactcgctcgacataagcttcgatagcgccggagccgccggagaaaacaaaacccagataggctccgccaaccaaggatccgagcagcgtgttgtatttcagcagcggcgcgaagatatacaggaagaaaggagcaaagaagattagcagtagggtaatcgtccagagtagatgctttttcagccccagtttatctgaaagcacgccgaataccggttgaaagcaaatggcgaataacgatagagaggaaaagacgattccggtatcggttttgctcaggccaatcacgtcggctaaccaaatcggcaggaaagggaaacaggctgccataataaaaaaatagaaaaagacaaaccaaccaaaaatccaaaagttagagttattcttattaaagaatgggctactttgcatacaacccccgtaaggtactcaatatgttctgcacaggttcgctggttatcgttctcggccaggtgcctgccagggttattcatcagggaaagcgcgacgaacctcgccgcgcattaccaacgggaattacaattgttcgaacttgatcaaaatggcactttcaggatccagcaccggtaaagctaaaccaacctgtgccagccattctccattggcttcgatcggctgaatcatccatgggggtaatactttcatggtatgcccgccttgctcgacgctaatcagttccggtacgtccagcaggctaacgcggtaacgagcctctggacgtagataaggcatacgtaactgaccaggcagagaccaggttggcatcgccagttggctgacaatcagtagcgcctgatcctgcgattcgctgactacgccgtgcagcagggtcgtgggatcgtggctatccagccgcactacgttgccactgtgtaataaaggtcgcaaagatttgtgcagggcgatatagcgggcaaaaccgcgctgttcttcgctgctttctttcaccggatccaattccacgcccatatggccaaatagcgcagtcagtccacgaaaagcgatattgtgctgccgataagtggtgtggcagagtttgccaccaatatggcttcccatgacttccggcgggaagaaataactcataccgcgttgaattttctggcgttccaatgcgtcattgttatctgaaggccagaagcgatgggtgcgtttgagaatttcatagtcaatacgaccgccgccggaggcgcaggattcaaattcgacgtgaggatgatgcaattgcaaagtatcaagtagacgatacagcgcttcggcttgcccggttgaccccgcgcgcccctgatgaccgggctgaacgatttcccgattcatatcccattttacataatcgatgtcatgctcacccagcagccagtccattcgcgctagcagataatcgaagaccgccggattttgtaaatccaacacgtattgccagcgtccggtcggctgttgatagccgggaagcgccaatagccagtccgggtgtgcacgatataaatcagagttcggattaaccatttcgggttcgacccagataccgaactccatgcccagatctttcacctgctggataacaggttgcaagccgttggggtatttcttttcatccagataccagtctcccaacgccgctctatcgtgatttcttccttggaaccagccatcgtcgataataaagcgctcgacgcctaggtcggccgcctgccgagccatcgacataatgtactgcgggttgtgatcgaaatagatgccttcccaggtatttagatgcaccggccgggctttgggctgcgggaagtggacaatgtgttgacgcacgaagcggtgtaactgttggctcatgccattcagcccgtgattagaatggctggcatacagccaaggcgtggactggctttctccttccgccaaactgacttcacccggtaaatatagcgcttcggcctgaagcaggcgacgtccatcggttttcacatcggcgcgcagacgatggttgccgctccagcccaaatgaataccccaaactttaccttgttgttcactataaccgtggcagccgagcaccatgccggggaaatactcgtgggagctacgaccccggcggttttcctgctgatagctaccgtgctgcaaggtcacgcggtggggctggaactcttttacccagcgaccatggaaagccatcacttcatcggccgtttcattgactggcagcgtcagtgccagacgatccagccagtaattttcgcagcccaaattggttaagctgttacgcaggctaagaacgccactggcgctatccagattcagctctgaggtcaggcgcagtcccgcgatatcatcttcgccaataatcgttagctgattatttttatgctcgatttgggtggtaacaaacaccggcgaccagtcctttccgtctcgatgtccttccacgctggggcttccgaacaggccatgccccagttctgccgccagcgttagcggtacgtcaacgtctaaacgtccgtgtggcactgcccgattcagggtttgaatatcttcggcattgaaactgtgcaggtgcggtccccaataaagaatttctgcatatggctggcaacgaatgatgacgtcagtggctgggctttccagtcgcaggatgcttggttccatataatcctctcggtaagctaggaatgaatcagtgaggattagcattgatccgaaacgtttcggcttaaaccgaaacgtttcggatctgtgatgaagttagaataatatcgagtcaacaaacatcggatacattaaatttagcgatggagttaagtgaaaagaatggtttttttctttttaaatcagagtattaatttgctttgtgcagtgtgtccccaacgcctaactttggttgccacaaaacctgtagctgttctactggcgcaccttcaattaaggccaacgtcatatcggcgattttttctccaaccgcagcacgagtctcttgaacaatcggcgtgacggtggtttcaaccaaagaatcagccggtaatccatcaaatacaatcaatgaaatcccttgagaacccagcaggttatgttgctgtaacgccattgctgcgccgtctcccagcatattactgtcggttactatggcggtagggggctgcggcaacgccagcaagtgcagagtggccagatagccggcgcggcggttgctatcaattggctgctggtaaccctcgtccagcggaatctggtggttagccaatccatctagataaccttgtaagcgttgattaacataggtttgctggctatttccccccagataggcaatacgtcgatggccaagttccaccagcttttctactgccagtagcgttccggcgcgattatcaaaatcgaaccaggcataagggctatccagtgagctgcggcccatcgctaaaaagggtaaatgatgctgagccagatagcgtaaacgacggtcattctgctgcgtgtgtgccacgatcaacgcgtcaacccgctggctttctatcaggcggataaacgacggatgttggtcatgagatacatctgaaaccagcaataaatcaatattatgcagtgccagcgcggcgctgatggtactgatggtttccagaaaggaggcgtcgttaagcacgttaggttgaaacggataaactagcccaatcgcatcggttttacccattttcaagcgccttgccaaagcattaggacgatagcccaaacgttcggctacggcttccacccgctggcgagtaatggcggatacatcgctgtagccgttcagcgcccgactcaccgtcgtggtggacagctttaattctttggcaatcatttttaacgacatagggatctcggcaggaagaagaaaggaattatcccattgattcaatatggtaataatttagggcgttgggcagtgaaataccagaggaaatgcccttatttgcgtgccagaccgcagggaaataagcggtaatcgctgtgtattaccgcttcaggagatgaacgaaagcctgcaggacgcagattaaagcgattgagtctggctaatttgagccccgctatcgtcaaaataactgtatgtcagcgtggctccgtgagcgttggcgggcagggggttttcggtgctgtactcacgttcgctgaatggtggggtcatcatatccatttcctgcaggatattaatctttttccctttgagactcagcgtcatttgcccgaaagagacgtgatacggcgtgggattgtggctccgcagccgtgtttcacccgcgttctgtatcagcgtgaaattcactttcttcatcgcagcttcgggggagtgagtcagtccttttgggcgataaaacactttcatttgggtgttcatcgccatggcgacctgcggattatcttcattattggaacgctctttcggcgggatctcgtacaaattcagccaataaacggattctcgatcgctggcgggttgattacctttgctaatgatacgcaggctttgcattgatcccggctgcattttaaaaaccgcaggcagcggcaggaaaggggctttggcctgatccggcgtgttgtctacgtcaccatcatcaatccagctttgtaccactacgggatatttattggtattagccagcattagggtattttctctttctccctggagaaagattattctggtggcggaggccacaataccggcatccgcattgagactgatgataaatagcagcaacatggttagtgcggataacaggtttttccgcgtgcagagcgtatgaaatcggatcattgtactttcaccaaaacgtatgcggtggcatcgattttaccggcggttggtgcgctccccggcagttttttcagcgtagcggtaaattgggtggtgtaattgttataaccggcggcgctgctgccgttggcattggcgcccgcgagaatgggataccacccagcattagcagtggaggtacagttaccgctgcatcctccccagccgacaaaattcatcggcgcaccgctactgtcttccagcgtgataccgacaccggtggcgatgcggctgtcggtgccgtacagatcggaaagcaaatagctcacgccgcccgccgtattcaccaaacctaatccctgcgctttcaaataccccggtaaagaggtttggataccgattgaggtttggccgctattgataccggaaatggttcccgtctggcattccacatcgacattgatgctggcactgcgggtttggtcttgcgccagttcgctaacggtaatcgtgggaaaaaccacataaggggtgacattgcgcaccacgcaggtgtttttacggctcagggatgagaccggcgcggtattcatgccaaaagccatatagcgaccggaaccccaggtatcgaagcgggtggaggagtcatagcccgtttccggcacatcggctcccggccctttgaacaccacatagccatttggctgattacaggtgtaattaccggaatatgtgtctgccgccgggccgggacagccccaggttgaggggccgggagtgcgatccaccgcggcgactttttttagctctgcgcgtatctggctgaaatgtttgcctttgatttgaattttattaccgagtatgtcgtatttagtcagacgaacctgctgccagattcgggtgaattccatgccggaatccacgtgaatcagtttcagcgcggtgtaagggaaaaaggtttggaaatagttatcccccatattggtatagccgccgacgttactgtcgccattggttgcaaaaacctcgtacagactgtctttatccgccagatcgcactcgtagagcaccgtttccggattggctaacgctcgcgccggaaccagactgataatgctagaagccagaatagaatctactggctgaatataattactggtcatattgatattgccaaagcgtaggggcgcgccgttgctgtcgccgcccaggttgtatcctttccagacgcatttggcatagccgggcaggctcagtgtgagcgagacggaaaatagcgccagcgggagaaaatagcgtttaagcgtaattttttggcaatacgaggttgatgacatcatataacttcctgaattagtgcatatcattggcacaaagtgcgtcaaaagcgatcagcggctgtttatcatcaacgccgtccaaatcgtaaggcagaatgcagcgctggtggtcgccatcgccccatttaatcgtgagttttccctgtcgttcatcggcacgcagataagcctgaccggcctgtccaaccatgcccaccacgatattttctcggttatacacgttggctcccatcggaacgatgctggtatccggacgcttgatggtaatgagcaacggatagccgtttagggtacggaaagtgactttcaccgcggaaccggcataaggcgcgatgcggcgttcgccgtcctgtaattcggttttgaaatccattccctgcggatccagggaaatagtgttgtagcgataaggggttaaagtcggcaccaatgcatagccgaagcgatcgatactggcaccttgcccgtacatcactttggctccttcggcacctttggcttccactaacgcaaaggtttcactgagataggggcctagggtgacgccaccgccgtgcacggcgacagcaccgcgcgcgctgccagaggcctgccagtaaccggtactgagtgaggcgctgccgctcaggctggtgaccggcaaccgttgttgcagactgccgctccaggtgttttctttattgcgttggctgcgcgagaaatccaggctgtagctggcagactgatcttcaccggtgacgcctgaaagagaggtttgataattggtaccgctactattgctgtgaattgcgccgatggaaacataaggtgcactcgggctgcttcccagagggaatgacagagacagctgtgccagcgtttcttttccggcgggcgtttgtaagccgctttcgatcggcatacctgttatcggatcttcaaaattgccgctgccggtcgagccgccggtcgtctggcgtgaaacggagagattcacattgacctgattccagagcagcgtggcgtaacctagctgcaattggttatcccgactgcggccatcgcggtaatcctgcgacgaggcggtgaaatacagcgagccatagtcctgcaaactctgattcatcgacatttcaacccgcgagcgctgctggtagctaccggactgccaggtttcaccgcgactggttgctcgaacgccaatgacatcgcctaaatcacgatagccttcggtggaataacgatagcctgccagagataacgtggtgcccgtcggctgaaaggtgcggctaaaggaggcgcgcaccatccagccgtcttgatgttcatcattaggcagttgcgcgctggagtaagtggtgtcgaagcccagagcgccaatatagtgagcgaacacgccgccgagcataacgccttgataacctgaggctaaacgcaggcctccgttagcggtcagggcgttactgataccgtactgataggttagctcgctaaatgtttcgccattccccacatcgcgtatctggccgctggaaaaactgtagcgtgaaaaaccggggcgcagtgattctggcaccgaagaaaaaggtacgcgaaagctgctggtggaaccgtcggcttcggcgatgatgatcgttaaatcgccaccaaagttggtggctgaaagatcggttatttcgaattgccccgcagacacggcagtttgataaataggacgatcattctgataaaccgttacgttggcattggttttagcgatgcctcgcaccaccggcgcatagccgcgaagggaatcgggcagcattcggtcgtcggttgccatggtcacgcctctaaaacccagactggaaaaaaactggccggatgaaaacccctcgcccagcgtgatttcgctgcgcaggcttggcaatgcgcgttgagcgtaaacccgcgtggtcgtccagtttccgccgcgattattgtcatagcgaaaggagccctgttggcgtaaacgccacatgccggcgtttacgccgttggttagcccaagataagtggaatcggtattctgcgtgacgccgttgcggttataagctacgtgatattggttcagattataattactgaagcctatgctatcgccgacgttgaggtttttcggatcgacataaccccgaggcacctgcttcacaaaactttggggtacgcccagatcgaagcgtaataaagaataatcaaagtgctgagtgttgcccggtaataaaatttccagaggctgacaatctgtttgtttcttggcctctgccagtgctttatcggcaatgcccgcctgagccaattgttcgagagaaaaacaggcctgaaccccagcggtttgctgcgtgaatttcagatctattctgtcgataaaatgattattcatatagagatcgacctgatagatgccgatctccagattattcgctttattaaatctggcgagtgatccttcgcctagtggggagccacgtaataaggcttcttcaaaaacgtattcatctctattgccatcattaggcactgaggcaaaggcggagtgcgttatcagcaaacccggccccagcgtataagacaaccaagagattaatttcactttctatacccactgatttcttgattaaacataaaccagttataagctataaatggttgagatattcgctccgtagtcgttcactaacgtaagggtaagttgctgacctttaatcgcttttattccttctggaatcgtcagaatcgacgaagattttggggataccatctcactgctggcgaaagaaatgattttattattcaccgtcatctgcgcgtctcgtaagctaatgaaatatccggttgggttatttatgattattttctgtccggtattatcactgaggctaacttgtattttttcatgcaggttatcggtgttttcattaagcgcggttggtcgataaaataccttcaggcgattttttacaatcagcactaatttattattggcctgtttatccgctttcatggcgggaatctgtagaaagttaagatagaaaacggattcgcgatctttggggagattacgttcgatataggccagacgaactacctgaccgctttgtggctccatacgaaatatttgcggagtcagtaaaaaaggcacgtcgtctttggttggtgatgactggttattaccatcatccatccagatttgcaccaaattcggattatcgtctttgttgctgagctgtaatattttttcccgcgtgccttccggataaaccacccgcgtgcctgtcattacaacgcttgcctgcgctgcaaaagaaacaatgctggccaaggccagcaagatgcaggcaatgatgtttttagcgtatatcgtcattggtatctcatattcttggcgtgttgaattaattagcctgaacgggtaggccagcatcactggaattatcaggggtaagtaatggcgtattgtgccgaagccatcacgctaccggcgaccgcatttccgctttccgaaatatattgcacggagagatcctgagaggccgaagttgcgcctgttgctagcgtaattcccggaacctcaacggggccggaagttaaaatgaccgggcgatcggttgagtctaatagttggattgccacaaactgagcggtaccggtgttacccaaatttccggctggggtgacgttcattccctggaataccgaactgattttggtttctttgctggcgacattacagccggtcaggttgatggtgaaattggttttaccagcgacgctattggggccggacagactggcggaagcgacggtgggcagtaatacaatcggcgtatttgccgagccatttatatcgacctgacaggtttgttcagctacctcaccctgaaacttaatggtgttattagacgtggcagccaatgcaacaccgggcaaggtgaatagcagggccatcagtagcgttttattcattctgatctcacttactttatatgatttaaggacacagacttgttcgggggggagggcaagatctgcgaggcacggacgatggcgatatcaacgaccgtggttaatcagcgcgtagtgtaggtgggatgacctgcaagcagaatgagaggcgtctttgatttctataggaaacgtcctacaagctttgtaggataaaggctactagagctaaataggctattttttaggaggttgggtattaataaaacggcgattggcgctgagctttgttttgttatagagaagcgtcatagagagtaggcagaattaaacgggtaaaacgccctctttcggtgatggcgttattatcaggcgcgggtacaggccgtttgcccgaattaccgggcagcggctttggcaatttgctcattggtttgtatcaataacgcctgccatattggccagtgttcggttattgcatgatgattccgactggataacaaatcctcaaacagaatacagcttgcgactaaatcctccgcggcgacaaattgaacgccgccttttatgcgatgtatcagattggcaatttccttgtaatctgtttcccgttcgaggggattgtcacttagctgagtcataatttgctgtaggcgcgccaaatccaactgattactgctcaacaacgaggccaatagctctttttccacaccagcgttgccaccggaaagctggcggagtttactgtgcattgcgcgcgtatcttcagccgcctgcatcaactcagtcgggacttgggcggtgataaaaccttgctgtgccagaatcatacgtagggaatccagcgtgacgggtttaatgaggcaggtatccattccggctttttgacactgcaacacgctttcttcacgagcatcggcggtacagccaatcacaataatatgacttagccgctcatcgttacgaatgcgataagtcagctcaaaaccattcattaccggcatattgtaatcggtaatgaccagatcgaacgtttgttcttgcagcagcgcccatgcttgcgcaccatcattggcggcgactacctgcttcaggccgatgaacgccagttgctggcgtaatactttacgattcacctccatgtcgtccaccaccaaaatattcagatggctgacttgttgcggcatcgcggaaagtctcggtggattatcggttgccaccggtgtcagttccgccagcgtcagaggcagcgtgataaacaggctggttcctttgcccagttcactttccatagaaatatcgccgcccatcttcatcaccagttggcgacaaatccacaggcctaaaccggagccgccaaaacgcggcgatccaccctcattggcctgactgaatggctggaacagtgaagcctgcgccgtatcggaaataccgattccagtatcggtaatatctatgcttattattccctgctgaggggcggtggtttcccaggtcacatcaatggaaacgccgccttgctcggtaaatttcagagcgttgcccaacagattgccaacaacctgtttcacccgcagcatatctaccaacaataatggcggtatttgatcgtcaatccagctggaaaagcgcaattgacgctcactggcgataggctgataaatttgcaacaaccgctcgaattcagcgcgaaaatcggtcgcaaccggatgtacgctaagttggccagcttcaatttttgccgagtcgataatgtcatccagcaggcgaagcagcgattgagcagaattagacacggtttttaacgtttctttttgtactggctgttggccacgaatttccagttccagtagccctaaaatggcgtacatcggcgtgcgtagctcatggctaatggttgccaggaaggtacttttggctcggttggcgctttcagcctctaatctggcggcttccaactggcgctcgatgtttttacgctggctaatatccagccagccgcctaatagccctttttcagcgctatttaatgggataatccacaggaagatatcccgcagctcgccgccaatttcgattgaaatatccagcatttgcggctgcatatcctgtaatacctgttggcataaatcatcaatttgtctatccagcggagtaatgagcggccagtcggcattgtcgccattttgattaagcagatcttttagctcatcttcacgatcggcggcaaagtaacggttgtaggtcgctaactgcccgtcggcggtgcggataaacacagcgaacggcagggcattaatgatcgattcctgctgtaataatcgggtatgtaattggctggcttgacgccgtttattaaataccaggtacccaaggtataaaccgcatagcaacagcaccgcagagctaattttaagcaacagcatcagccattggctttcaatagaatcatccgaggcatacacaggtttgggtttataaacgctccattcgctaataatgctatccagatcttccggtgcaatggaatccagcactttatcgataatcgcttttaactctggcacttccggccggatagcaaaagccatacctaggggctcttcactcgcgaccgcaacgattttaatattgggtttgaaatcctgcgaagcaataaagttggcggtcatcatatttttcaaaatagcgtcaactttgccctgctgtaaccagcgcaccagcgtcatggtatccggcgcttcgataaaattaattttctgatttaagaatgggttggaaataatattattagagacgctcccggcctgtaatcccacgcgtttaccggccagatcggcgacattattaatatccgttcggtcttcacgcactaatattccccataatgactgggaaaagggcgtgctgaatagcgcatcgttataaaggccatcgcgaactgccacgccgggcagcatatctattttcccagcgcggaaatcttgcagcccttcaccggtattagtgataaaaacgggttcaaatttaagaccggtacggcgggcaatcaaattaatgagttcgacagataatcctgccattttcccggtacgacgatcgcggaatataatgggagccagatcgagcggagccagataagtcacaatcggatgactatgaatccagtctatttcctgctcggtgagcagcattttggcatcgatattgtagtgatgtcgactcccaaaccagcgctgttgaatatcgccggttgcccggctgggcagcaattccagcactacattgagatcgtctatcagcttttgattgctggcttttgccagaaaggaataaggcgccgggtgatagggggcgaaattgcggatttgtaacgtcagcagctgtagctgatcgattaagtagttggctgaggtcgcgttagcgacaaaaacatcggcgttaccataggccaccgccaataatccttgtagttggttgggataggcgacgatattatcattatgataattaaataaaaattctggtgatagcggttcattatttacaatcgctacggtttcaggatggcggcgttgggttgggtcccaatctttgctgcggacttcgacgtgacggttagtgaagaaagcgtgggaggcaattagccccggctgcgccagcatcggcgttcctgccattaaatcaatctgaccgttttctaacgcattgagcaccagcccgtaatcgcagtatccgatcatctggaatgataactgactggaatcactaattatttttagatagtcggcaacgatgccttcgattgaattatcatcgcgattcacgacgaaaggggtgttagcgtcgatcaccacgcccactctcagggtgcggcggctggattggcgcgtatcgatttctggcgttaacagcaggtcatcgctgtaattcttggcgatgctatgtaacgttagcggttggccggtatcacatcccagccggctatttatcggtgcggccagcgcaggcgcgacaagtataaatagcaggaaaaacagccatgtagatggctggctacaccagattgtgggtatgcgcatagtcagccagctcaatcactgaggatagccccagcttggttaaaatgcgggttttgtaggtgctgaccgttttattactaataaacatctcatcggcgatttgtttattggacaatccattgaccagataacgcaaaacgttaatttcccgttcagacaacatgcgcgcgcggttgaccgaatcatggctggaaggttgcccagcgagctggcttaaggcctcggatgggaagaacgaataaccccgcaggacgttttgagcggcgaagagtatttcgctaatgtctttgtttttgctgataaaaccgttggcaccagcttgcagtgcgcgcacggcaaaaacctgttcgtttttggctgacaagaacaacgacttgccggtgaatccacgctgttgcagttttttcaacaaagagaaaccgtcgaagttgggtaattcgatatcaataatcactaaatcaacaggctgggcatttaacattgccagcgcttcattaccgtcggcggattcataaatcgctgagaattcattgttctgcgataataaggcgcggatagcgacgcgaattgcgggatgatcatcgattatcattacagacttcataaatactctccaaaaaacgttattttaaggatatatcaagcatagcatgctgaatttcccggctgacagagacacgaatagtaagataaaagagaccacaattaatgactaccaatccgcaatcaaacagattctaatcactgctaacatattatcaagaaaagaattttttgattacaatccgttattgtttcatcgcgatagccagcttctgatctaaagaaaaatgaatgtattcggcgttgggatttatcttagcttaatcataatgctagattttaaattggaaggaatatataaacttattgataatgaatactattattcagcgattgtgatgcgtttaaattttcccgtcgggtttcgtgtaaacgtaaataaaccgcacaaaaagatcctaacgtaaaacacataagcaaaaaacccgactaagtttccttaatcgggcttctctaatatggctcctctgactggactcgaaccagtgacatacggattaacagtccgccgttctaccgactgaactacagaggaatcgtgtgaacggggcgaataatagcgaggtgagagggggatgtcaaaggggaatacgttaatttcgatcgtttgctcatagaatgcgcaacttattgagattttgtcatttttcgcaccataacccgcctttttttgcatatcaagcagattgtaatccctttgcgagcgccgttaaggctggccatcgtgtatggccaatgagcaaataggctttttggtcggttaaaacgaacatgccgtagggatgaatctgcagaaaataactgtcccccggtgcgggttgaagttgacgatatagcgactgtggagcgccaatttgcatgattttgcctttattcatcaccaatacggtgtctgaaacggcaaagggttcgctttgaacgtgagtaacatgcagtgaagggatattaaactgctgctgcaattcacgaattttatcgcgcatgctgaggcgccggttggcacccagattactagcggctcgttgaataacagtaccttgggttttaggagcaaagcgcgagccagggtcacacgctgttgctggctgccagaaatttgaacgacataacgatcggcaaaaccgcccacacccgccagcgcttctttcacccgatcgttaatttcagcctttgggcgaccaagcattttcagaccgtaaccaatgttttcccctagagacatatgcgggaacagggcgtaggactggaataccacaccaatatcccgttgctggatggaacggtcagtcacatcctcaccgtcaataaaagtttgttcgtcgctgaagccccgacctaatagctgagtaaagttattcagcggcagagtgtcatccgcgcaccagtggatggtgaaactgccgtagaaaatactgccggacagcaagatgttaaaggcgatcccgacatacagcatcgccgtggtaccccaaaccagtatcaccggtagcggttgtacgtctgcgcgagaggagttaccggaaatggtgacgtaggaacgtttagctatccacatataagatcagcggcgccaaacgtaacccttgcggtagcagtatagtggcgttctggctctcatcgctcaggtaaaaactgatggtccaaagagccagtcaactgagggtgaaggatctcgctaagaatagcgaaatccccagtgagcggagccgtagcatgtcagtgagcggtcagcagttgatggtgtagtgcaaagtgaaccagttcgaccgttgtttcacagttcaacttacccaaaatattggcgcgatgaacgtgaatggttttatggctgagagcgagctgatcggcaatggactttacgctaacgccgctgaccagaagttgaaacacctccttttcccgaggcgttaagacattcaactgcttaggttgctgaggcatgtggcgcagcgcttgcagcgcattggcacacagatacagcccgccgccgctaacggatcgcactgcctgcaccagttcttccgggccgcagcgcttagttaggtaaccgctggctccggcatcgaccgcactttgcacaaaggcggtggtgtcataaatgctcagaataatggcgcgaaactgcggatgctgttggcgcagacgcttgagcaggctcaacccactttcatccggcatagagatatccagaaccgcaacgtcaacattggtggttagcagattttgccaggcttcagcggcgctgccgtactcgccgacaatgcgaatatccttttctaaagataataattgagcaaacccggaacgaaccactacgtggtcgtcaatcagcgcgacgtttatcataactttgtaataatttgggagagttataaacatcatgcttatcaattcttgtttgggcaataattgttagtgaaaatgttgagaggttaacaatttaaaatgaagaatgatcgaaggggagaggcacccccctctggcgtccgtaggatttcggcacttgccggagagggatggaagggcgatcaacccagcgttttggcgcgataaattcgctgtggacgtccaaccttgccgtaaatgatttccgcctgtagcgcattgtttgcagagcagaattccagataacgccgagcggttgtgcggctgagccctaaggtcacggccacgttttcggcggtatactcggcatcactatcggcgaataaagcctgaattttatccaaagtgagctgatcgataccctggggcaataccgatttttgcgtaccccgggcgtaggtgttgtacattgcgtcaatttggcgctggctgactttatcgccttcctgcaaagcatgatgccggtgactaaagcgttccagagagtgctctagccgctcgtaagccacgggttttatcaggtaatcgaatacgccgtagcgtaatgcttcagcaacggtgtccatatcgctggctgcggtgacgaaaatgacaccgaaattgctgccttcaagagccagttccctcaggaattctagcccagagccgtcgggcaggtagttatccagcaggatcaagtccggtttaaaacgtgccgccatgctacgcgcctgctgtagatttccggctaaccatacctggcggcaataattgctttgcttgataaactccgcgtgcatttctgccagtggcgtttcatcttccaccactaaaatgttaagccattccatgggatcccctagcttttgagatcataggtctttggaataaagaccgtgaataaagtaccctgcggtgggttcttctcaacggtgatggtgccaccgctctgatgaacataagtcgcgaccaaatataagccgataccgtgttcctctgagtgtttggaactgacaccgcgctcaaacaggctgtcttgcagctcagggtcaataccgcaaccgtgatcggcgacttctagaatcaactcatggccttcatcggataaatacatttcaatatttttatctccatcagggttcttcagactggcttcaaaagcgttatccagcaggttaccgatgattgccgctagctcattttcaccgagagttacaggcagtatgcccaactgacagccgggaataaaggttaagctcagccccaactctttggctcgatggtattttccaaacaacagtgccgcaatttgccggtttttaaaggtatcgcgcagggtatcaatgagcgcctgctgggaggacgattcggtttttaccatctccagcgcgcgatcaaactccttcatttgcaataatccgctcagagtggacatccagttgagatgttcatggcgaacggtacgtaaattttcaacatactgctttatctggctgagctgtgcgctgagggtataaatatcatcctgactgcggaagctgaccacccagccttgaaaaatatcatcagtccaaataccggcacggtttgcgatgatatttaacccattaaaggtacacaactcatcctgtcggtttccgccttcccgatcgaggaagaaatgatccggagaaaccacttcgctaacgctacggccaaccaattgatatggcgtggctgatacccgtaacattttacgagcgttttggttgattgccgtgatcttgccctcaggatctaccgccaatagtccttcaaacaccgccccaaacagggcttcctgctgacgaagtacccgcgcgatctcctttggttccattcccatcatttgacgacgaatatgattggaaaacaaccaggcaagaaacaacagggtaatcaaaataataacaaaataactggtgaggggagtgagataactcaaacgccagtgatcgattttactgattagatagccgagggacactacgccgataactttgccatcgctatcaaagatcggcgttttagcccgcatggctttccccatcgatcctttgccatagatgatgtagctctcgccgcgttccagtgcgccttctttagtccactgcatcggcaggccgattttgtccggattaggatggtaaagacgacgggaattggcatcgccaatcacaatgtagtcaaaatcggagctggtgcctagccgtgtaacaatttgggctaagcgttgttggtctcgctgcttgaccgcagaaaccacggagtccatagaggcaacaattttggcctgattcatggccattttactgacctgattgatcagatattgttcgaaactatgggttagaaagcgatccattgccccgatcaggataacggagaaaaccaatagcattaaaaatatgcgcagcgggaaggcaatgttctttaatccacgccatttaaaaaaatgggctttaccagaaagcacgttattcaccttttatggctgaatcaaataaaacgacgagtaacataatttaaattaaatgattaatgcaaataaaaaatcattatctctaattaaatcaattaaaatcataaaataaattatatttactaaattaactgtgaattaggtcaattaaccgagaagtttttatgtttagcatatatttctgaacagggctttcaaaaagtaagaataagaatttataagaattttaatgcgttaattgcatttatacttttaataaaaagtcatgattcatctgttaattgcatatgtttattgtgttttatttgttatttaatggttattccagagagaaaattatggatagggtatttaggataattaagcgttcagaccatcaaaggattgtggaaataacgcattttttacgtgaaaacgacttaaatattgatacttccgttgaggtgtttattaccgtctcagtagatgaaagattggtagcctgcggtggaattgctgggaatattattaaatgtgttgccattagcgagcaggtgagaggggaagggctggcgctaacgctggcaactgaactcgtcaacctggcctatgaacggcaccacagccacttatttatctacaccaaaattgagaatcagtccttatttaaacagtgtggattctacccgattgccagtgtgcccggcattgtggtgttgatggaaaacagttcctgccgtctgtctcgctatgcgcgccagctctcgaccttacgccagccgggcaagaaaataggttccatcgttatgaatgccaacccttttactttggggcatcaatatttggtacggcaagcggcggcgcagtgcgattggttacatctatttttagtcaaagaagataactctcgttttccttatcaagatcgcctgcaactggtactgaacggcacaaaagatattgccaatttaaccgtgcacgccggttcggaatatatgatttcccgcgctactttcccctgctatttcataaaagatcagggggtggccgacgattgttataccgaaatcgatctgaaaatctttcgtcaatatttggctccggccttgggaataactcaccgctttgtcggcactgagccattttgcaccgtaaccgccaaatataaccgggatatgagttactggctggaaacccccgatttaccttatccgtccatcgagctggtggagatcgagcgcctgaaatatggcgcaaccgctatttctgcctcgtgggtacgcaaattactggcgcagggggataaggacaccattagcaagctggtacctgccgcgacctgccactacttacaacgactgctggctcagcctgcaaaagcgccggtcagcgcggtcaacaaatctgtatttcaattaggtgaataatgaaaattatccgagaagcggtcgccggcactttggagtcgagcgatgtcatggtgcgaattgccccccacgatctgccagaagtggatttgctgatcaacagcagtgtggagaaacagttcggagaagccattcgcgccagcgtattggcattactggatcaactgggattaacccaggtgcaagtgattattgacgataaaggggcgttggattgcgtacttcgcgcccgtttggagacagccttgctaagagcctgtgacctgccgcacctgccctggagccaaaaatcatgaaaccagagatgaagcaaagaatgcgtcgcagcatgctgtttgttcccggcgccaatgcggcgatggtcagtaatgcttttatttatcaggcagatgccatcatgttcgatctggaagattcggtgattctgcgggaaaaggatgcagcacgccgtttggtcttccatgccttacagcatcctttatatcaggaggttgaaaccattgttcgagtcaatgcgttggattcgctttacgggctggacgatctggaggcggtcgttcgcggtggcaccgatatcgtccgtttgccgaaaaccgatgatgcgcaagatgtgattgatatggaaagtgaaattgcacgtatcgaagcggagtgcggccgggaacccggcagtaccggtatgctggcggctatcgaatccgctcaggggattactcaggcgttggcgattgcccaatcttctcctcgtttgataggtattgctctgggcgctgaggattacgtgcgcaatttgcgtaccgaacgttccgcagaaggtgttgaactgttgtttgcccgctgctccattttgcaggcggcgcgagcggtgggaattcaggccttcgataccgtgtattccgatgccaataacgaagccggttttctacaagaagcggcgttaatcaaacagttgggttttgacggcaaatcactgattaaccctcgccaaatcgaattgctccataacctatatgccccgacacaaaaagaagtgcgccatgcgcaagcggtggtggacgccgctgaagcggcagaagccgaagggcggggtgtggtttcgctgaacggcaaaatggtggatagcccggtgattgaacgcgctagggcagtcttgcaacgagctgtgctttccggtttacgcgacgaataagagggaattaatcatgaaacgccaacaacgggttgatgccctaagtcaaaacccaaatctgaccgtcacgtcctatcgggaagcgtctaaagccaatttgcaggctcaaaaaccgagggatatcaagctgtgtagctcactggaaaaggcgattcgtcgctctggtttgcaggatggcatgaccatttcgttccaccatgcttttcgcgcgggcgatatgacattgaatctggtgatggatgccatcgctgcgatgggattcaaaaatctgacgctggcatccagttctctgagtgagtgccatgcgccgctggtggatcacatccgtaaaggtgtggttagccgcatttatacctcggggttacgtggcccactggcagaggccatttcgcgcgggttgctagcagaaccggtacaaattcattcccacggtgggcgggtcaatttgatcgaatccggcgagctggcgatcgacgtggctttcctcggtgttcctgcctgcgacgcgttcggtaacgccaacggttacacaggcaatgcctgttgcggttcgctggggtacgccaaggtggatgccgattacgccggtaaagtggtgttattgacagaagttattgttccttatccacataatccagccagcataggccaggatcgggttgatctgatcgtacaggtggaacaggtaggggatgccgataagatcggcgcagatgctacccgtatgacctcgaatcctcgggaactgctgattgctcgccgtgcggcggaggtgatcgctggctccggctattttaacgatggcttttctgtgcaaaccggcaccggcggagcatcgctggcggtaagccgcttcctcgaggataaaatgcgccgccgcaatattaaggccggtttcgctcttggcggcatcacctccaccatggtggacctgcacgaaaaagggctgatcgaaaagctgctcgatgtgcagagtttcgatcgcatggccgcatcctcactggcgagaaatcccaatcacattgaaatcagcgctaatcaatatgccaatttcagctccaaaggcgcgtctgtcgatcggctggacgtggtgattttgagtgcgctggagatcgataccgattttaacgtcaatgtgttgaccggctctgacggtgtgctgcgcggagcctctggcgggcactgcgataccgccgcggctgcacggctggcgattatcgttgcgccattggttcgcgggcgtattcctacgctggttgatgctgtgaccacctgcgttacgccaggctccagcgtagatattttggttaccgatcatggtattgctgtcaatcctgcgcgccccgagctagccgagcgtttgcagcaggctgggctggaggtcgtcactattgattggttatatcaacgagcgttgctactcaccggtcaaccgaaagccattgcttacaccgacaaagtggtggcggtggtgcgctatcgcgacggcagcgttatcgacgttgtgcatcagattcaggaataagcgatggatatcttttcaccgggtttggcggcgaatcggaatatcagcctgccggagttattaactagccgggaggcacgctatgcccgccagcgagcatggctgatgcgttatggcactacgttgatttcactcaccgtggttgcccccggggcgttgaaagacagcccgttaactcgccgaatttttgggcgggcatggcaaacggtgacggagctgacgcggcaacaaggttgggaatccttggcgcaggaggctttcccgctaccgaccggttgtgaagggttaattgctctgaatcaacccgctgaagcggtaaaagatgcggcgctactgcttgagatgaagcacccgttggggcggctgtgggatatcgatgtgttagatagccacggacggattttgtcccgtggggatgtggggttggctccgcgtcgttgtctgttgtgcaaccgcccggccaacgtgtgtggtcgggagcgaacacattcagtggatgaattgttagttcaaatggagtggatgctcgatgccgctattgcctgttgataacgcattcccgctgacttttcagctacaggactatgccgatctggcctatttcgcgctattggctgaggtcaatctaacgccgaagccggggttggtggatcgctttaacaccggtgcgcataaggatatgaatctggatgatttctatcgcagcgccgaggctattgcaccttggttttctcgctttatcgagcaagggatagccactgagcacctgcagggagaggcggcattgtctgcgctgcgcccgctcggattagcctgcgaaaatgccatgttccaggctaccggtggggttaatacccataaaggtagtgtgttttccctcgggcttctgtgctgtgctctggggcgtttgtccgccagaggcgtggctatcagcgcagatgccgtttgccaggaagccgcccaactgtgctgcggactgacggaaagggaattacaacgcagaaatctgcaacaaactgcaggtcaacgtctgtttactcaacacggtctaacaggggccagaggagaggcagaatccggctttactaccgtattaacccacggattgccggtgtatcaacgcttgttaaatcaagggatagatcaggagtgcgccttgctggaaaccctgctgcaactgatggcggttaacggtgataccaatgtggtgtctcgtggcggcatggcggggctgtactggctgcaacatcaggctgcggagattctggctaacggtggcattaaaacgccattggcaaaggctcggctgcgcctgttcgatgcccaatgtatcgctcgaaatttgagtccgggaggaagtgccgatctgctgattttaacctggtttttggctcatattcccgatcgtccaccttacaaacacaataataacaatgctataggagtatctctatgttgaagtcacaagagaagatatggaaagcccttgctccctttattgttctagggatcttgttattaattcccacaccagaaggtatgccaccgcaagcctggcgctattttgctatttttgttgccatgattgtcgggatgattttagagccaattcctgcgacggcgataagctttatcgctgtgacggtctgcgtattatctgccgactgggtgctattctcgccggctgaagtggccgatagtagctttaaatccggtaaagaagcgctgaaatgggggctggccggtttctccagtaccacggtgtggttagttttcggtgcctttatcttcgccctcggctatgaggcaaccggattaggccgacgcattgctctgtatatggtcaaatttatggggaaacgcacgctgacgctgggttatgccatcgtcatcatcgatattctgctggcgccgttcacgccatcgaatacggcccgaaccggtggtacggtgtttccggtagtgaaaaacctaccgccgctgtttgattcattccccaacgatccgtcctcgcgccgtatcggcggttatttgatgtggatgatggttatcggcaccagtatcagttcttccatgtttgtaaccggtgcggcacctaacgttttaggcattgaatttgttggtaaaatagccggtgttcatattggctggatgcaatggttcctcgctttcctaccggtaggcttgattttgttgatcgtagctccgtggttatcttacgtgctgtacaaaccgggcgtgactaaaagcagcgaagtgtctacctgggccaataccgctttacaggaaatgggttcgctgacgcgtaaggaaatgacgttaataggattggtattgctgagtttgtgtttatgggtcttcggtgccaaggccattaatgcgacggcagtgtgcctgctggcggtttccctaatgctggcgttgcaggtggtgtcgtggaaggcgattacgcaatattcgagcgcctggaacacgctggtcaatctggcgacgttagttgttatggctagcgggctaactcgttccggttttattgattggtttgccgataccatgagcacgcatctggacggtttctcacccaaaatgaccgtggcggcgttagtgctggtgttctacttctcacattatctgtttgccagcctgtcggcacacaccgcaaccatgctgccggtcattctggcggtagggaaaggtttgttcggcgtacctatggatcatctgtcgatgttactggtgttatccatcggtattatgggtgtattaacgccttatgcgaccggccccggcgtgattatttacggctgcggctacgttaaatccaaagattactggcgattaggcggcattatggggctgttatatatctccatgctactgctggtaggctggccattaatgagtttgtggatgtaactcgcaaacagaaattacgggcgttggtgtgtatccagcgcccgtttggcgttcagacttgcattcagtgtttcattaagagtatttatgcgaactttaacgccttatagccatgttataaaagtggttatgtcggtgtcaaagcgcaaacttagtgctaaacgggtaattaatctttaaaacgcggcataaatcacggcatgtttattgtgaccatcctcctcagctactactataaaatcccttttggcgatttggtctgattatcctgtgaaccctgtttttattcggaactttgccttctcctccatcccggctgtcggcctaaatggtcaggcaccttatgagggattactggggaaatgtgattttgatgtccatgcctatcaggacaatctgtttgctgtatacggcattgcctttcctcccagcctgcaaaaggcggtcaccaagcggcgagcggagtatctggccgggcgctttgttgccaggcaggtactcaatatgcttggcccgagggactaccatttggaaaacggccccgaccgcgcgccctgctggccagacggcatccaaggcaccctgagccataatgacaaccgggtattgtgcgcggcacaaattattccgttacgcctttctgccggcggtagtggcatagggttagatgtagaaagctggattggttcggatcggattgacgaaatctggccgggcattattaacgatgcagagcaccatcaattacaacgtggacctctgccgtttaataaaatgctgacgctgacgttttctgccaaagaaagtctgtttaaagcgatttatccgcagttacgctgctattttgattttttggatgtgcgtctggtgggatgttcactggagtcaggccgctttgaactggagttattgcgagaactgagtccggaatttaaggcagggcgtcgttttcaaggctgttttaaattgatggaaactgacgtgcgtacttttgtggcctattaaccgcgattgtctcctctttttgcgcccgtgtttttcctcatgggttcaattaagccgaaaccttgtggtctcggcttttttaatgccaaaactaaatcgttaagctctatgggctgatataaactggactcagagtttctattcctgaagctccggtgtctctgcgtgggtacggcagaagatgaattaatgtctggcgtcattccgaaccctctgttttaaacgtttcacactggataataaatttacaaggacacaagtggtgttcatcctgtcactgcgatggggtagtctggtgttgttaatgaatgctgttagccaatctcattctagatttgactttttattgttataggtaatcatcgaaaaatcagcgatgtaactggaggttctccctaggttttcccttgaatgcttataataagttaacatacgtttttatctccctggctgctcaacaccttataaaatcgcggaaacaattaactctattgcgataattaaagtgtgtcggcattatcccgaaaagtatttcgtctaaaaattttcctatatagtgaaaatataaccttgatggatctgtaaaagatagagttgtgattaatataacgaacggacatgttcttcttgttgtttactttgtaagatttccctcgcaaagattgtaattcaaaatcatcactaattagaacgactttcttttttaatcgactgaatagttgatggatgttgttattgtttatcgtcatctctctttctggccaaaccaaagtgagtaaatcatccctatctattagctgaccgtttgacgcatgattaaccagtgcgataaataataaatactctttattcgttaactctacactacctttcaggctatacacaatcttttcatctgccactacaaaatacatcatggttaattcctcctgttagcccaaaaaaacgggtatggagaaacagtagagagttgcgataaaaagcgtcaggtaggatccgctaatcttatggataaaaatgctatggcatagcaaagtgtgacgccgtgcaaataatcaatgtggacttttctgccgtgattatagacacttttgttacgcgtttttgtcatggctttggtcccgctttgttacagaatgcttttaataagcggggttaccggtttggttagcgagaagagccagtaaaagacgcagtgacggcaatgtctgatgcaatatggacaattggtttcttctctgaatggcgggagtatgaaaagtatggctgaagcgcaaaatgatcccctgctgccgggatactcgtttaatgcccatctggtggcgggtttaacgccgattgaggccaacggttatctcgatttttttatcgaccgaccgctgggaatgaaaggttatattctcaatctcaccattcgcggtcagggggtggtgaaaaatcagggacgagaatttgtttgccgaccgggtgatattttgctgttcccgccaggagagattcatcactacggtcgtcatccggaggctcgcgaatggtatcaccagtgggtttactttcgtccgcgcgcctactggcatgaatggcttaactggccgtcaatatttgccaatacggggttctttcgcccggatgaagcgcaccagccgcatttcagcgacctgtttgggcaaatcattaacgccgggcaaggggaagggcgctattcggagctgctggcgataaatctgcttgagcaattgttactgcggcgcatggaagcgattaacgagtcgctccatccaccgatggataatcgggtacgcgaggcttgtcagtacatcagcgatcacctggcagacagcaattttgatatcgccagcgtcgcacagcatgtttgcttgtcgccgtcgcgtctgtcacatcttttccgccagcagttagggattagcgtcttaagctggcgcgaggaccaacgtatcagccaggcgaagctgcttttgagcaccacccggatgcctatcgccaccgtcggtcgcaatgttggttttgacgatcaactctatttctcgcgggtatttaaaaaatgcaccggggccagcccgagcgagttccgtgccggttgtgaagaaaaagtgaatgatgtagccgtcaagttgtcataattggtaacgaatcagacaattgacggcttgacggagtagcatagtgatcggcacgtaagaggttccaactttcaccataatgaaataagatcactaccgggcgtattttttgagttatcgagattttcaggagctaaggaagctaaaatggagaaaaaaatcactggatataccaccgttgatatatcccaatggcatcgtaaagaacattttgaggcatttcagtcagttgctcaatgtacctataaccagaccgttcagctggatattacggcctttttaaagaccgtaaagaaaaataagcacaagttttatccggcctttattcacattcttgcccgcctgatgaatgctcatccggagttccgtatggcaatgaaagacggtgagctggtgatatgggatagtgttcacccttgttacaccgttttccatgagcaaactgaaacgttttcatcgctctggagtgaataccacgacgatttccggcagtttctacacatatattcgcaagatgtggcgtgttacggtgaaaacctggcctatttccctaaagggtttattgagaatatgtttttcgtctcagccaatccctgggtgagtttcaccagttttgatttaaacgtggccaatatggacaacttcttcgcccccgttttcactatgggcaaatattatacgcaaggcgacaaggtgctgatgccgctggcgattcaggttcatcatgccgtttgtgatggcttccatgtcggcagaatgcttaatgaattacaacagtactgcgatgagtggcagggcggggcgtaatttttttaaggcagttattgccgttatttaacgtcacaaagtggggggactatcccggttatgtggaagaattaaatctatcgttggcgcgttgtaatgcagataaaacggcggtggcccaaataatgtctccccaaaaaggataaatctctcttttagtcaattcagacaagggcattgactctataagattggcaaacatggatttaccgattttgtactcaatatcgaggcgctgccgtaagcatgcctggcaaaagcaggataataggttattggttgcgaaagaaacacggcggttaggggcgctcttcgctaggatgacagtcaagcttactgcaaaaagaaatctatgctggcacaaatccgatggcaaaaagtaggcgcgttatgtttcgctcttggtgggctgcaatatatttttgctttcttttttcttatcagaacaaggtttcatcaaatcgcttgaaagagtacttaacataagttatcgagagcgtgtatatagtattatatatgataacttacacgcggggtgtaacttaaataaggctgcagacttattaggtataagttctgcaaccttaaaacgtaagttgcaaatggagaatacaacattcacagcaatattattagatgtaagaatgaaccatgctttaagtttattaagaaattcatctctttcaatttcacaagtgtcttataaaagtgggttttattctgtatcgaatttttgttcaaaatttaaacgatattttggtttgtcaccaaagcaagtttcgaagaaattaaccaagaacattaaacttgaagttttgaagttttgaagttttgaagttttgacatccttcctgccctaaatgatagggattcctactgcgttcaggctatcacctgaattatttcggtgggtttactagaggcgagaacagagatgcttaaactgaaagcgcagcctaaacttgctgaggaagaacgagatattctgaaaaaggtagcgcggtactttgcaagagagccagactaaggtaccgcttcatcaacgatcaccaagatgtctggtcgatcgcagctacgcgcacctggcaaggctggctctacatgttcgtggtcatcgatcttttctttgcgtgtaatttggtaggttgctcaatgaaaccgacgctgtcacgtgaacttgcactggacgtattgctgatggccgtctggcggcgtatacctgcggaaagcgtcattttacacaggatcccagaactgtcagtatggtagcgatgactggcaacggttcagctgggacaataaccggatccgagtataagtcgacgtggcagctgctgggataattgctgtggtagaattgttcttcagcccctaaaaaaagaacgtatcagaaatcgaatctctaaaaccagagacatggcccaggcggatagcttcgattatatcgaattgttctacaaccttaccgacgccaccgtcatgtcgagagcttttaataactttcattagtgctcagaaaagcaagataatactttatttcaaactcttaaagtgtttcaccacaggccagttgttcagcgatgcatttaggtgtattcccttggcctgtccacgtccttttctcacctttttcatcgagatactcatatttttacgggctccggggcttcctatatttatgggtaatgccaacgccagcaaccaatgctaacgggtcagttccgtcttaactgtgtctgaaagtatggggatatgctgtcaatggagaactcaatacctagattgcgggtattacctaaggcttctttcagccagttgcgcgcggtgtcgtcggagatctcccatactggttccgtcccatagcgtgtgaaggtcgctaagtggtcgcgccgccgtcgtgaaaactggcatcgagcagaggtatcgttcttttcacaggcgtatctttgccgtgcggccgggtttaccggccgtatgatttttctgtttcaaatagcgcaggctttcggtataaccgatgaaaagcaaaaaacccgactaagtttccttaatcgggcttctctaatatggctcctctgactggactcgaaccagtgacatacggattaacagtccgccgttctaccgactgaactacagaggaatcgtgtgaacggggcgcataatatccagaggcacctgaactgtcaacgctaaattcagtagaaatgcgcgtttgctcagcatctgagcaaaaaatgcagattcggttggaaaaacaaatgctagcgttgaaaaattcgtcaatatattgaaatcagatgaaaaattaccgttagctctctgtcagctggctttcccatcttttcagacgggcgagggggtcttgcaaataaaaccgacagaaatggtgataaactgccgggaagcgtgaggctaaaagctccggcgcgctaaagaaatattctgaaagcacagcgaaacattccgccggatcgctagcggcataggcatccatactggctccctcaacgccgaccatatcaatctcgtcctgaatattatccattgcgcggtgtaaatcgaattcccacgccgcgacgtcacgcatgggaatgggagggacgccgttggaattaccgccgttgcgcatatccaatttgtgagccgcctcgtgaatcaccagattaaagccggagagatcgaaagaatcttgaatatcctgccagtttaaaacaatcggcccctgttcccagctttgtcccgactgcaccgtttggccgctgtgcaccagccccagatcatcctgccagtcgtcttctacgataaatggggcagggtagatcaggacttcgtgaaaaccatctaaccaccgcgcaccgagttccatcaccggcagagcaaataacagcgccaaacgagcctgcatcagtgcggttaactccaagccctgcaaaggtaccatgcgtttctgctgtaaaatctggctggcgacggtgactaaccgttgctgctccgcttcatccaatggagaaagtaaaggaatagccagtgcttcatgccattgcatcagcacttccgcttgcggttgatttgctttccacagccacttcatcatcgtgtcgctcgcaatgtgatttcttgggtaccaaggcaggatgttgtaaacatgccgtaaaaaagagcatgatggcaactataagcacggagagatgccggagcggctgaacgggacggtctcgaaaaccgttgagggggaaacccctccgagggttcaaatccctctctctccgccactattcaatcagttaggcgagattttttcagcgacccgcatcacagttagtctattgtcgatatgtcgggctgccatatttatgggcgacttcacttttttattcggtcaataggtgtccaaaatcagtgaaatattatttcactcgagcgcccggtaatcgcttatcctacgatgtaacacaaatggctagctgggctacgtgcttgggtagtaaaaatgatgagcggtgttttgtttataagtaaaatccaataggactacttagattatagtagactttgaattttcatataacctatagcgcgagccacgcggctacttaaatatggactaagagataattaacgcttgggggcgaataaaaagaatctctacaatagaaggcgtaggattcaaaaacggcgcggaagcgactaatgaaatcattcaatctggtatctaacctaccctcttacatactgatattttagaggaataattactcaggcgcttgacccggaaagcttactcagacagaaagcgcacttggctagatatgcccgcccattgctgctgatttgaaaaatctgctgtcggaagaataggtaaggaatatccagggctattcagaaaacgtttagcgcccaatctggaagtttctgtaaccgctatagaaaaaaagtctgctaacaggcggtgatataacttatcgctttaacctatggaatttaattgcttatatcacggtaacttactttaccttcaagtttcttggtctatctttgctaagctaaatagataaactaaaggagcataagaagatgcaaattccccctaaacctccgaatgagaacgctcgtattgcgacactgctcgcttataatattcttgatacttctcccgaagaacgttttgatcgaatcactcggctagcaaaacgcttatttaatgtccctattgccttgatatccttggttgatgttaaccgccagtggtttaaatccagcgtaggtctggccgagtcggaaacatcgcgagatatctcgttttgcggtcatgcgattttggaagaggggattttgatggtgcccgatgcgttaaccgatcagcgcttttgcgataatcccttggtgatcgatgcaccgggcattcgtttttatgcgggttgcccgttagtggtgccaaacggtagtaagctgggcactttgtgtctgattgatgtagagccgcgctctttggatgaaaccgatcagcagctattatgtgatctggcaaaaatggctgagcaagaaattgccgcggtacaattggctactattgacgagttgacgcagttgaccaatagacgcggtttcgaaatattggcacaacatgcgttaacttattgcgtacataataatattccggccagcgtcgtgttttttgatcttaataattttaaagcgatcaatgataattttggtcacgccgaaggtgataaagctttaatgactttcgcggacgaactgcaactattcttcagtgagactgacatcgttgcccgcttagggggagatgaatttgtggcgctactgacggcatctagctgcaaagatatggtggacatactcagtcgctttaaaattgccttagagcaaagaaatcgtcgtgaacgacgagggtatgatatctgtttcagcgtgggttatgctaactgcgattttgataagttcactacaataaaagcattactagctgttgcagattcttctatgtatacacataaactagagttacgcgataaacggaaatctcaacataagaactgagctaatgtttcggttttgctgtcatggtttgaatcaacaagagtgcaaatatcctttggaactacgttatcctatggcaatcgttggtctataaagataaaaacaactgacgtacgcacgaaatatttaaaatgaactaaataaggttaataaattagccagtatctctactagaaggcctcgcttgaacgaggctttgttgtttaataaacaggaatagttaatcccaccctattgcattattctcaatcaacaatagattactaatggcacttcggttatttccctcaaccggagggatgtatttagttatgtagatcatcggtcaacgatatcgatgagacactctaggcctatctatagcaaacaatttagctccatttcccagtttttttattcattgagatatttgcacggtatcgctcgaaaattagccagataggtcgtggcttaacttgatgaaaatgcatgcaaattaggtattaagatatacattattcatctatgttgtttaagattttacatgtaatattattttgaaccggccaatccagcaccgtatagcatagataagaatcgcaattaatttttaattaaggaatagcatcgaatgaagcagacattaagatattcgacaatagccctttcgttattcggtgctttaattttgaccggatgtagcccggataaaaagaacgataatcatataaaagttggtattagcgcaggtatcgatcagcctctttgggatgtggtcaaaaaaacggctaaagataaatacaatctcgatgtggaagtggtgacatttacggattatgtcttaccgaatgaagcgttaagcactggcgatatagatgctaattcattccagcaccggccttatctggatcgccagactgcggagcggggctataaattagcggttgttggtactacctttgtttatcctattgctggctattctaaaaaaataaaatcgctggctgaattgaaagataatgctcaggttgctgtaccgaatgatccaactaacctcggtcgtgcgctgctgttattacaaaaagttgagctgataaagctgaaagatggcgttggtttacttcctacctctctggacattactgaaaacccgaaaaaattgaaaatcgtcgagattgaggccgcgcagctcccgcgttcactggacgataaaaacgtggctcttgccgtaattaacactaattattcgagtcagattggcctaacgcctaagaaagacggtctgtttgtagaagataaagactcgccgtacgtcaatattattgtcgctcgtgaagataataaagacagcgagaaaatcaaaaatctggttaaagcttatcaaaccaatgaagtcgtggccgcagcagataaaatttaccatggcgatgcagtgaaggcctggtaataatttaaggtgaaaagtctggctgctttagtcagtaactaaaaatagtattataaaaagaaaagcactcacccattattaggtgagtgcttttttactacatgtgttttttagcgaatgacaaaatgtcttgtttgaggtcggttacttttttctctggagatttcttgcaaacttcaacgactttcggtgtgactagcgtgtcagtttcctggaaatctacatagtcaccttgcttatattccgtggtgtcatttaacacccaaaatacaactggggtgtaagatttaggatttaagtcaaggaactctttacaagtcatatctgcgggagtcgttgctgcgaaggtggttgcagcagcggagagtaataggcttgtcagtgcgatttttttaaatgaattattaaacatactgttttcctttttatctctaccttgccaaggacaatttatatttacgctaaaaaacccttgttagcaggagtattctgaacccaaataagttcattggtcaatatcagaaaggaaattctatatatattgatgatgacaggtaatcatcaataggccaaggtgattttaaataaaataaattagttaataatcaataatttaaataggttcatggtcatattccatgtatggattgtttttcttatctgtaaacttttgtttaaattgtaaatcatagattacacgaaattctaaaggggggctattttaaccatttaaatttggcaatattattttgcattttgcattttgcattttgcattttgcattggcttttaaattaaatataagaccagaatgaattggatagttgaaattattaatatgttagcgaagatgcaacaattgcatcaccttaatagtaaggaggttacagaagccggctataaataacaaagcatgtcattatctaacatggggcaaattcattaataaaaaataatatacattcgcattttaaatatattagtgaatcatgttgttgtaatcacagttctcaaccatactcctcgtgataaagtttattatgagtggagcgggggaatgataacgataaagcggaagctaagcttatctgcaatgatattaacatttatcggcagtgctataactatcccaaaagtagtggcggaagaagtgggatatacgctggaaaaagtggtgatattgagccgccatggcgtgcgatcgccaactaagcaaacggaattgatgaatgaggtcacgcccgataaatggcccgaatggccggtcaaagctgggtatcttacgccaagaggtgagcagctagttaagataatgggacacttctacggacaatatttccgtcataccggattattgccgaaggaaagatgcccggctgaggggcaggtttacgtttattcagatattgaccagcgtactttattaactggtcaggcgttaatagacggaattgctccccagtgtggatttaaaatatttcatcagaagaacttaaagcagatcgatcccttgtttcatcccgttgaggctggtatctgcgctttaaatgcaaaaaaaacgcaggaagcaatagaaaagaagcttggcgcacctatcacgacattaagtcaacgttatgctaaatccctggccttaatggggaaggtactcaatttttctgcttccccatattgtcagaaaatggaaaagcaagggatggattgtaattttgccgatctatcacctaacgaagttcaggtaaatcaggaaggcagcaaggcttcattgagtggcccggttgctttgtcttctacgctggctgaaatatttctgctacaaaactcgcagggtatgccgatagtggcctggcatcgtttgctgacgagagaggattggcagactctgatgcttttgcataactcgcaattcgatctcatggccaaaactccttatatagcacagcataaaggaactcctttattacaacagataaatgtggcgcttttacagcctgagcagggaaaggctgggctagataaacagcccgcgactaaaaaaacgctaagcaatactcaattacccgataacaatgcggtatttattctaggtggccacgataccaatattgcaaatgttgccggaatgctgggtttaaattggacattaccgctgcagccggataatacccctccgggaggtggattagtttttgaacgttggcgagatcagcatggacaaagcttcgtggcgattaaaatgttctaccaaacgctaaatcagctgagaaatatggagaagttggatttgtcgattaacccagccggaatggttagcatcgatattcctggttgcgaaaatgaaggtgaaaataaactgtgccgcttagcgacgttccagaagaaagtcgtcgaggctattgagccggcctgtaatctgccataagtgatagcggcgtaataaaccaataaggccactgtaatgcaggcggccttattggtggttacgagagtaaagtcagatgagagattgaaatcttattaaggacgttattggccaagacgaactagatcaaaaggcacataacgttcgcaggcgtgttgtaactcaacacactgagcgcgctcggcctcaatatcagagagtccatcagcatgtattgccttcgcaacatcaatcaaacctgactgtgcgaccataacgcgatgcccagggcgaatttggtttctatttctgtcatagactttaaccatattgacctccagttaatcctgtcaatttgcggctataggctacttatcacgcccctaatttctttgcctcagatcaaaaatatttaattttttatagctgagttttatctactgacccaacagcgaatggatatgcaaccagaaaggaaaggtctgactgccggattgctattaaaaaagctttatagaaggtaacaaggattgcagagcataagcacaacgagtttaaatcaggtttggtacgtatgagtcattggattagggtgttcagtgatgactttcggttattaaccatctcgacttatggtctgacttaacaaaaatgtatagttcaaatgactgatttttatctgtaaacaaacttatatgctattagtgtgatatattagcttgctatttatgagccgtactggtttaatgcgtcatcggtttggaacacagaccttatgaaagcagttttagtaaagcagttcacagtattagcgttatcctcaatagatacctcttcaccgcgaaactccttcttaagtgccccataagaaataactgaaagacagacctctcttgccttatggcagcttaaataaatgaaggaagtatcgctatgtctaataaaatgactggtttagtaaaatggtttgacgcgggtaaaggctttggttttattaccccagcggacggtggcaaagatgtattcgtgcatttctctgctatccagagcaacgattttaaaacgctggatgaaggtcagcgcgtagagttctcgattgagaacggcgcaaaagggccttcggcggccaatgttgttgccctgtaaagacaggcaataacggctaattatcaggttagaaatccccggtttttgctctgatatgaattgcccaaataaagaacgctttgcgcgagataccaagtttggagatccttagatcgatccttaaactacggtactatgacggctcctatgactaggagccgtttttttgtgctatttttcaggttagtgacaactttcattgctacggtattcttcgtaaaaatcattccactgaattaatttatcacagcctgtttaagcacgttagaattcgcagggctaatctcaaagagaatagagcaaacagcgacgtgggaatttttataaagaaacgccctcgtctatcaagactgagggcggcaaagacttctattcgaaaaaaccagcgccattccagttaatcgagctgaagggattggataagcgaaatagctagatcaatcgttggccagtgagcgcttcaagaattttcaacggggactgctctgggtgtttcataccctttaccggtaataggaaggtctgttccagcatatattggcctcccattgcggcatgtggtgtttgatctgaaaaacaaatccaactgctaccaggcggaaattcgatcgcaacttgttggccattttgctgataatctgcgtcagatttcattttatcgtgtagctgcaacattaaatgatcgtaatggctgcgtcggagtttggtgataccaactttatgctgtaaccaactgctaataggtgagtagcgatcgagttttggcagataacggctcgctaattgctgaaaatcttcacctactcgccaagagcgattttcaccgtggggattaatattggtgaaaatacgaataatccgctcaccgtaattaggcctcgaggggaaagcatcaacgtgtaaacggctatcatctttgcgccaggacgttttgtcccgccatgcggcgactggatgcagccttaggctgttagttgggctgcgtagggcatgggtatattcaggtaataattgtcctaatagactaacgcagtgttgataatagcgctcaagcagctggcgcgttagctcgattttactttcatccgtcacaccagtaagttcaccttccagaggtttgaaactgatgtttttgcgttttatatcgaccagcgctgggttcagtaattgcttctcttgtgagcttaacgggaaagccagattcggtaaaaaaagaacttttccctgttctaaggcttcaattgcatcgggaatgacatgctcattcttgccccaatgttggtgagggagagtgagaatcatcggatctggggcgatagagttagaattcatcagatatccggcctagattattttagtcagtgataaataatataactttttttaaacaattaattgcacttttgtggcgaattgcgagcaaacagaacattccggttagtggcagagcaagtaatggagtggcacttatgcagagtgtcccattaggtgattttggttctgaatattctgaggacaatgatgctcaatgagctgagcatcatggtgctagataaggttgttttagagaggatggcgatagacgacgtatcgtattcctttggctaagaaacgtagaaaaattgaattaatgtagtgaaatattaatatgttaactgaactgtgattggttctaataaatatggacataaaaaagccctgataatctgatcatcaaggctttttttatcaggtacatatcatctgattagacaggcacgattctcgagtcagtaatcgaggagacttgcttttttgagtaggccagatcgtaaacatcgtagaaatcgatttcgcctttattttctatgatgcgtttaattttatttttaaagtcatcattgatatttttattttcaagcaatttagccactgcttctggagacagagcgcggctgaaaaaccattcgccgttatagcaaacgcggaggtcgagtacaccaatgtcttcaaatttaaatatcggctttatttccatcaataaaattgctgacatgatgacaaaaaatgcagtaaaaccaataacgtaataagtaccaaaataaggtgttaaaagcatcagaattaaaacaaagaaatatgaaatcagcattgccaaacacaaatacggatgtttatgaatgaactcaatattaaagtcaagacgaccattccggttttcttttttattgattttctcaatgtcttcaatgagtatttcttttattatatccattgcgatgaccttgtaattgcagatgagtcggataaaattattatctattactatagattagcacgagaaatgcgtcctcaagtatatcagttcgatgaattacctgacctaactgttataggcagtttctgcgtatcgtgagtttttgaacactgttatcacctgctggtgacgacgtaattccctgctttactgagctaaaatttagtagagcgtagaacctgatgagattgaacgctctacttgttttatcaagcacggggtgactatttgaggttagaacgtgagtacaattttaccaatatgagtgctcgcttccattaactcatgtgcggcggtggcctccttgatagggaaggtcgcaaaaacctgtggttttagcttccctttctctatcaatggccaaatttttagttgtaactcttctgcaatgattgctttttctgccacggttcgtgaacgtagcgtcgagccggtatgtgtcaggcgttttaatagcatcggcatcaagttcagatctttagcaggaccattttgcgtacctatttgtacaattctgccattcatcgcagcggcttcataattgcgtgctacatagtcaccagcgatgagatcgacaatgacgtcggcaccgttgccttcagtggctaattttgtttcagccacaaaatcctgagtacggtagttaatcgctacatcggcgcccattgccaggcaagcttctcgcttatcttccgatccgacggtgacaattattttggctgcgccaaaagctttgcttagcatggttgaggttgtaccaatgcctgaggaaccaccgtgtatcagcacggtttctcctgcttttaagccgccgcgctgaaataaattagcccagacggtgaaaaaggtttcgggtaacgccgccgcctcgatcattgataatccttccggaaccgggagggcgtttgtttcgtgtatcacacaatattcagcataaccgccgcctgcgatcaggccgcaaactttgtcgcccatcttgaatcgggatgttttctgtcctaaggccacaacttcgcctgaaatttctaaacccggaatgtctgatgcgcccggtggtggggcatacaggccgcgacgttgcagaacatcgggccggttaacgccggcagccgcaactttgactaaaatttgcccttcatctggtgtagggatagggcgtttccctgccatcaagacggaaggtgggccaaattgggttatttctatcgcaaccatgcgactatcggaggttattgaagacatatcattcctctttagttatggcgaactcattgagtagccaatggcttctgatttacagaaaaggttaatagtttaataaacccctctgagtgctgaccatattatcctcattgtgagaataatccattcgtagagtgcgagtcagatgtgaaaagtaaggtacgacagaaagtaataaataaaaaaggcgcccaatagggtgggcgcataaaagtgctaaaaatgaataactacaggactaagagatactctggatcattttaattgtatgggtaaacccataggccgttatataggtataaatcctaaaccttgctccataaaaaagccggcttagtttacttaattatttgaactgccagcagacttggtaatgatagttttctgcattcagtaggaaatcatcattgacactgggactccaagaatcgtccccaccaacgcccatgtggtaaccatcgatgtttaaccaagtccctttttcatgtttcagcagatgttgatgtgatgtttccatcaattgttgcaagccgtagcgactaatcccgaaatggaagttacctgttagttgtaaattgccatagcttaaactgcgggtgttacaacgcaggccattctcactagggaacgtatagggagtgtgtagcgattcaagaggcaaagtccattggctgaaagtcgcagatagttggcgatctggataattttcatgtggacccagcccaagccaacttacttgcgattcgataagattcagttggcagcacatgcctatccgggctggagatggtgagcctgaggcccgcgtaacattgacttcaattttcatctgattttgttcattgaaatgatagacccaacggctttttaataaacctccttgaggagcgttatactcataatctgcggttatcaatacgccattagacattgtgctggcatgtattgagatacaacggcgatcaagttgatacattccggcctgtttccagcgctcaacccaggcatttggatcaatccgcgtcgtttcgctgataccaatatcattatctaatggagcgcgaataaactgatcctgaagcggagtaagtaaaagcggtttttcattaattaaccactgttctaataaaccactttgtcgatcgaataaccaacgctgacgattattttcaacaatccaatattgctcattagatgtaagttgaggatgtccaatcacggagatattttgcttcgatgcggtgttcgatgcgtgggttaatgaaggcagaatggtaggtaatttccattggtgccacgctgacttgtggtcttcttcagaccactgggtagcggttggttgtttaatctcaacgtgtagccacaattcaccttgtaactttaggggagctggtaatgatcctaactctagcttttggcttagctctggggcgataacaataggtatatttccatgctgaattatttctccatccagttctagtcgccagtaaaaatgttcattgtcagtatgacggaatagaaattcactggttacttccactatgagtggggtggtgctgacaagcgtaaattgaaagaactgctgcgctcgctgtgcttcataaaggctaggatggggagttctatcagggaaaaccaatccgttcatacaaaattggcggtcgttaggagtatcaccaaaatcgccaccgtaggcccagtaggcttgcccgttttcatcatggcgagtcagactttgatcaacccaatcccaaacgaaccccccttgtaagcgtggatgctgccggaaggcctgccagtaacgatcaaaaccaccaaaactattccccatcgcgtgcgcatattcacaaagaattaatggccggggctcttcgggtagaccaatccatttttttatcgaccacttaggcacggcatcaaaaggttggtcttgatccactctggcatacatcggacagagaatatcggtagcggcagtattggctccgccaccttcatattgaacaggacgggttggatcgttagttttgatccagcgatatagcgcatcgtgagttgcgccatggcctgactcattaccaagggaccagatgataatgcaggtatgattacggtctcgttgtaccatccgagtgacgcgttcactgaatgcattgagccaacgtggatcgtcagacagtcggctcatcggttgcatcccgtgagtttcaatattagcctcatcgaccacataaaggcccagttggtcgcataaacgataccacagcgggtgatttgggtaatgagagcagcgaacggcattgaaattatgccgtttcattaactgaatatcctgacgcatagtagcttcatctatggtctggcctgtcagcggatgatgctcatgacgattgactccccggataagcaagggtttgccgtttagtttgagtagccctttatcaatttcgattttcctaaaacctatgtcataagcttccgcctcaatgatttcttgatccaaagacttgagagcaacaacaacgcgataaagtgtaggttgttctgcgctccataagtggggcgattctaccggtagtaccaattcgacacgttccggatagttacctcgttcatcaattgttttgctccccatgtcctgttcttgctgcccaatcagaacatcatttagccaaagctgagcctttatcaaataattgtcggcaatatgaggttgcaatagaggcaaattgatcgccgccataacggagagctccgcggagcgaaaaccaggtgccagtagtgtcttaatctggatattagacagatggatatctggtttatgcagcaacgtcacgtcgcggaaaatcccgctcatacgccacatgtcctgatcttcaagatagctgccatcactccagcgcaagaccaacacggcaatgcggttacttccggtttgaagatagggactaatatcgaattcagcaggcaggcggctgtcttgcgaatatccaacccagttgccgttacaccacaggtgaaaagccgagtttacaccgtcgaaaatgatgcgggtttgaccggatgctggccagtcgggattgagcatgaattcagttgaataacagcccgtgggatttaagtcaggtacatagggtggattaacaggtatcggatattggacgttagtataaataggtgtatcaaaaccaaataactgccaatttgaaggtacaggtaaaagagttgatttaggtaagtcctgagtaatccaatcctcgggaacggcctcagggcggtcaaaataactgaaatgccaatatccatttagagaatgcagacttgccgaatcggtatcatcacgagcctgagtaacatcacgccagctgcgaaagggagaatgtgcatccagtcgattatattgagtgatacctgggttttcccagtcacgtcgagacagtatatttgccagtgatttctctcgattaccttgccttatctctgcattcattttcagccttctttttccgtttgattatcggggcttgcatttagtcgataggcgacactgaatcgcataaatatagccacacaaatgttatgcgctcacatttcttgttttgcttaccttgaaggggaaggaatcgcttgtaaacgggtaaaaaatgaataagcgagtgagatcgcatttatttttggttatgcaaaaaatcgtaaaattttttccgagaaggttcgtaaaatttatttatggctgatgatatgtgtgccaataacacgtaattttatttcgaactacaaggtacccagacgattcgctatttgtgttccgcaagctcttgtggtgtagtttgtgacatgattggaacgttatttactggggctgttgtttgacgaagcacaagttcagggcttaaaagcagagagtttagctggatgccatggctagttcgcagtaacgcgaccaattgttgcaggcttttctcgcctagctgacgaaaatcttgtctgacggtcgttaaaggggggtgaaaataggcactatcgtcggtgtcgtcgtatccaactatggaaacatcttttggaatgctgagaccttgttcctggagggcgcgtaaaacccccaaagccatctggtcactggcaaccagaatagcggtaaaagaggtgccgctttgtaaaagggattttgcgcaaagatagccactgtgtgcgctccagtctccatagaacactttctgaggctttaggccgctcaaggctaatgtggttaaccagccttgatagcgcagttgggaggaaattgtgtctttagagcctgcgatcagaactattttctgatgccctaacgccaataaatgttcggcaccttgcctggcgccatgaaacgggtcaaaaaccacgctatgagcggttgattgcggatcaacgtccagaaatatgacgggaacattggtgcattgatgggttatttctgcgctttgctgctgagttagtggcgcattgattaatatcccctcaactcgctgagccaggagttcattcacagcgcgctggcaggcctgctcgtcaaaatgatcaatcatggcgatgacgacgctaaaacctaattggcgggcttttatctttattgcagaggcaatctgcgatggcgcatgtaaagataaatcggttgtgactaacccaagtgtacagctgttcttaccagccagctgttgggcaacgcgattgggtacatagtgcagtgctgccattgcctgttctattttagctctggttttgtctgagacattcggagcctgatttaatacgcgagaaacagtctgataggatacacccgcgtaatgtgcgacatcatcgagcgttacggatttggttttcataaacagcttctcagcaacagaacttactgaacataatagcaaaattgtggcataaatttttgaacgcagcagtaaaaggttaaaatcgcctgccagaagccagaagccagaagccagaagccagaagccagaagccagaagccagaagccagaagccagaagccagaagccagaagccagaagccagaagccagaagccagaagccagaagccagaagccagaagccagaagccagaagccagaagccagaagccagaagccagaagccagaagccagaagccagaagccagaagccagaagccagaagccagaagccagaagccagaagccagaagccagaagccagaagccagaagccagaagccagaagccagaagccagaagccagaagccagaagccagaagccagaagccagaagccagaagccaggttttattttgtcggctcactgagctttatagataacacttatttaaaaaatcattcgcaacgaaattggcgtagggctaaaacctgcagagttaatgcaattttatagataagctggtttaactgatggcgttgatagctaaaagcatgggttagggtgaaaagcgtcaagcatcagcatcaagcatctgcgccaatgccggataatcaggcgtagtggtatttaatgaaatggttctggcgacaggttgtggccgggggaagtgaataaaaaatggcttctttgccttaattttaggcatgtgaatcacaatattcggttcctgtaataaaaagagttgctattaaaagcccgtcatgagttaatgcgtctcggcctgtggtacagacctatttatgcacgacatcttgagtaaagtagttcatatttaaagcgttatcgttgatagctcttcactgacgaatttccttcatagtgcctccataagtaacgactgataaccggctataacacgcccatggtggcaaaaattttttaattaaggaaataaacatgtctaacatgatgaaaggtcaagtaaagtggttcaacgagtctaaaggcttcggtttcatcactccagctgacggcagcaaagacgtgttcgtacacttctctgcaatccaagatcaaggcttcaagaccctggctgaaggccagaacgtacagttctctatcgagaacggtgctaaaggtccgtctgcagcaaacgtaactgcaatctaatcggcctctcgctgattaattgaaaaaacccgctcaggcgggttttttgttatctgtaataggccatgactcaagttttacgttccgtttgcaacatcccgttcttcctccagacaatctatcctcgaaagctacctatcagcgcttccttatttaaaatactacctatcggtaattaccgttgcataccactctggtacgcgtaaaccttatcattctcactgtattatgtactacactagctgcattgattaaggataggataagactatgaaagttaacgatctagtgacagttaaaaccgacggcggcccgagacgggaaggcgtggttcttgaggttgaggaattcagtgagggcgtaatgtatctggtttcactgaaggattatcctgagggagtttggttcttcaacgaaattgatagcaaagacgggactttcgtggaaccgcgttgaattgattaagcctatatacaagaaaccggagtaggggattccctgtctccggtttttttacatcaatgttagcctgctaccggctaacacattgaatatccgatatatagagagttaatcggcatgagtaactcgcttaaaatgtttcccagttttccgtatccagttctggttttttagcattaaaattattgcttgtcttggcgttacttgcgggttgtccacccgtgtttttacctttgctatttaattggaaaacagccactgcgtgagtcagcattgatgcctgctgctctagtgatgccgccgccgctgacgcttcctgcactaaagaggcattttgctgcgtgacattatccatttcagaaactgcctgagctacctgactaatgccccgactttgttcatcggatgcagaggcaatttcacccataatatccgtaacatgagtgaccgcagttacaatctctttcatcgctttgcctgcgtcagaaaccaaaatcgaaccgtcgccgaccagatcaacggaagcttcaatcagacattctatttctttggccgcgtccgcactacgttgagccaagtgacgaacttcactagcgacaaccgcaaatccacgtccctgctctcctgctcgggcggcttcgacagccgcgtttagcgccagaatattggtctggaatgctatgctattgataacattggtaatatctgcgattttcattgagctaagggatattttatccatcgtgctcacgacatcgctgacaatatcaccgccttcacgagctttgctggaggcattggctgccagttggctggcatgatgagcgttttcagagttttgttttaccgtggcggttagctgttccatgctggcggcagtttgttccaaagatgcggcctgttgctctgttcgtgctgataggtcggtatttccagacgctatttcactggtcccttgatagatagaatctgcgctatttctgacagattcaacggttcgggataatgattcctgcatcagctgaatgttgctgccgagtaggccaatttcatttttgccgaatggaatagtcggttgagtcaggtcgccatcggcaatccgttggatgcgggtgaccagcacattcatgggcttgatgataactttactaatgactaaaaaagtcaccaaagtaagaaccacggtgaaaatgaaggctccgcccatcaagatataacctaaccgagccccttgtttagccgattgatttatctgattggcttgctcggcaagataattaatgctggcgagcaaaggttcgttataggccatatctaactgtttaagcttttccgcttcgagagaaataacttcctcaaagtgcccctgttgtgaggcatccaacatcggcatcatcccttcgctgcgatattgttcgtaagctttcttaagcggtatatccagagctaactcatttttatctttacctgggcgattgaagtaaagatcaaacatcttttgcgattcagccagacgattctccgccgtttttaaaccggattgataactttccgtgtcgccaatgcgtgcggcagaagcggcctgaatcaaaattaagcgtgccgctcggagataatctgagctgttggataaacctagacgaatgtccacctctttagtagcgtgctcaagatactgattactttgttttaagaagtagctagatgtgccaatggccacggcaaacagtgccagtatgccagccagaattgccacaaacagagtaaccaggcggatattattaataaatatgacttttgcctgcgaaggcgtggctgtatctattaattgctgtgtacttccacttttcattattatttccgtcttaaaggcgatcgaagggagaggtaggaaccggacagaactttattcacattggtaattaactacataaactgcatagagtacttttaaaacctatcggccattgacccgaaatgcttagggttatatatgcgacagagatcgcaaaactgattaaatacgttcataaaactaaagaatggagcctataaggccgataaagctgcaaatttaccaagggatttatcagaaaaactggattggcttaatacagtatcgcggtaacttgctgtttttcatcttccttgccttcctcacgctctggttgaatggcccgagcgaagtacgatagctaatgcaatagcgctcctacgaatgaaagaactgctggtggctgtgaacttatgcttgagtaagggaacatcagctctaaaatgctgacaacccgacaacccgacaacccgacaacccgacaacccgacaacccgacaacccgacaacccgacaacccgacaacctgacaacctgacaacctgacaacctgacaacctgacaacccgacagattgaattctttatacagattgagttacagggagcggtagggataaacacgattatctttgcgaaggataagatacgcgaagcgatgcaatgtctcatacagggcttgggcttttgttaatctttctgagttagccgtcactgaaacgagtaaattcgtgataggggagctaaaaatgttttggttccctgcgcgggagagcaaaaatcaggtgcgctgtggcattacggaaactcataagccggcttaattgaacgccagaagattattttttccttgagcaataaattcaatgataagaatattttccttttttaagcgaaatacacttaattatcaacgtaaacgaagtttttaattatatttcctaatgaattattgtcgtttatgatttgttgaaaaaacctcgctttacatatttattccccgaacctataattatgcgaaatttcagtggagagaattaatggacacccaaagttgtagtcaaataagcaaggcaagctgactcatctccttctgatttgttgcttgccgaacatggcgggcagcaccctcaagttttattctgaactgtgcataccctagtgaattataaatagtcgatggttttatcatcgaaagagtttatttggattttattatggtattcaacggtcactctctatttcctcctggttttcacatcagttaattgctgagtattctctcggcacaattacctgtgtgctaaatagcacatgattactcttccattaataatgtggatagaatcatgtcattgactccgttcgtcttaaatatattactcgctacggctttgggcgcattaattggcgctgagcgtcaatggcgtcagcgtatggcgggattacgcacttatgctttggttgctacaggcgctgcgatatttgttcttagctctgccgtaacatctccggatagtccggggcgaattgccgcacaaattgtttctgggatcggttttttgggcgccggtgttattatgcgcgacggcatgaatattcgcggtttgaacacggcggcgactctgtggtgttccgctgcggtgggcgttctttgcggacttgggcttgtctggcatgcggtgtgtgcgactgcgattattttgagcgctaatatattactgcgcgaagctgctcatcgaattaatctacagccccaacaacaggctctcgatctggaagttcgttatcgtattcaggtaacctgcggcactgaagatgaaatattggtgagaacattaatattgcagggattgaatggaatggcactgcgtttgcaatctttatgtagcgcagatatttctcgtcccggtcaattagaagtgtgtgccgaaataatggcaacgccagcggcgcaaaaagaaatagaaggcattgtttgtcgcgttagtctggaaagaagcgtcagcgcggttcattggcgagtggcatcagaattgcccatatgaaattttactgttatctggcaaaactattaatcataaataataaactattctcacccaagtggtagtaaggagccgttatggacgagcaccccggagttaaattaatcaagcgttgttaatttcgatttaaattaatctggttggcaacgcaataaataaatctcgacgtcagtttattctcaaaataattgggaggataaaccctgcgtgatgagtatgaaataaaaagagatgcgttatgaccaaattaatgaaaacagggcaagcggaaaattatcgccgtgaaaaaaacaaaccttttgtcgttgcacaagaggccaaaaatagtctggatttaaccttatccaaattgaatgccaatttaaatggtttaaccgaagaggatgcccaggaacgccttgagcaatatggcgcaaatgaagttgctcatgataaagccccacatgcgttgatacaactggtcgctgcttttaataatccgtttatttttgtcctaatggtactggcggcgatcagtttcttcactgattactggctgccgatgaaacaaggggaagaaaccgatcttaccggcgtatttattattgtgattatggtactgctgagcggatttttgcgattctggcaagaataccgtaccaataaagcggcagaagccttgaaatcgatggtaagaactaccgcaacggtaatgcgtcgtgaaaaacacagcgtgcagccggttaaaagggaagtgtcgattaaagaattggttccgggggatattatttatttgtctgctggagatatggttcctgctgatctcagattggtttcttcaagggatctgtttatcagtcaggcaattttgactggtgaagcaattcctatcgaaaaatacgatgcattaagctgtgtaagccaaaaatcaacctcctcggaggcctgtagtgaaagtgagctgctggaattatctaacgtttgtttgatgggaaccaacgtggcgagtggaacggcgaccgcggtggtcgtggctaccggagggcatacctattttggttcgctggcgaaatctatcgtaggaacgcgttctcaaaccgcatttgaccgtggcgtcaacagtgttagctggttattgatccgatttatgctggttatggttccgattgttttactgattaatggttttaccaaaggtgattggacggaagcggcattatttgccttagcggttgccgtgggcttaacgccagaaatgttgccaatgattgtcagctctaacctggcaaaaggcgcaatcgccatggccaaaagaaaagtggttgttaagcgactaaatgctatacaaaatttcggcgcgatggatgtgttgtgcaccgataaaaccggcacattgactcaggatcgtatcattctggaacatcatttagatgcgaaaggctgtaacgatactcgggtcctgcaactggcctggctcaatagctatcatcaaagcggtatgcggaatctgatggatcaggcggttatcagttttggccgcggtaaatcagttatcgatcctttgcgtagttacaataaagtcgatgaattacctttcgattttgtgcgtcgccgcttgtcgattgtggtgaaagataaggatcagcggcagcagttgatctgcaaaggtgcggtggaagaaatgctccaaatctgtagccatattcgcgatggcgatcagattttgccgatgaatgatgcgcgtcggcaggcattgctgacactagccagccaatataatcaggacggtttccgggttctgctgctagcaactcgggatatgggatcgcaggtcagcaatgttccactcagtattcacgatgaaaaagagctgattgtcgaaggggtgttgacgttcctcgatccgccaaaggaaagtgcggcggcggccattgctgcactgcgtgaaaatggcgtagcggtaaaagttttaaccggcgataacccgattatcaccagcaaaatttgtcgcgatgttggtttggaaccgggagaaccactcggtggcagcgatattgaattgatggatgctgaaacgctggcgcgtgaagtcgagttgcgcacggtattcaccaaactaacaccattacaaaaatctcgcgtattgaaaatgttgcaggccaacgggcatacggtcggtttcctcggcgatggtatcaatgatgctccggcgttgcgcgatgcagacgtgggaatttccgttgataccgcaaccgatatagcgaaagaatccgcggatatcattttgctggaaaaaaatctgatggtgctggaggagggcgtaatcaaagggcgagaaacctttggtaatatcatcaaatacctaaacatgaccgccagttccaacttcggcaatgtgttttccgtattggttgccagtgcttttattccttttttgccgatgttggcgattcatttactgctgcaaaatctgatgtacgatatttcccagctatcattgccttgggataaaatggataaagaatttttgcgcaaaccgcgtaagtgggatgcgaaaaacattggccgctttatgctatggattggcccaacctcgtctatttttgatattactacttacgcattaatgtggtttgtcttcgcggctaatagcgtagagcatcaggcgctattccagtctggctggtttattgaggggctactctcgcaaacattggttgtgcatatgttgcgcacgcaaaaaattccgtttatccaaagtactgctgcgttgccggttttattgatgaccggattggttatggcgattggtatttatattccgttctcacctcttggcgcgctggtcggtctgcagccgctgccgtggcaatatttcccgtggttagcgggtacattgattagttattgcgtggttgcgcaattgatgaagcgattctatatccgtcgctttggggagtggctgtaaattaaagattctgattaaacggcgtcgtacaattattcaccggggtcttctgaccccggttttattgtttattcgttgctcacgcgaataaccaacttaccaaagttcttaccttgtagcagacccataaaggcctgtggggcattctccaatccatcaactaaatcttcgcggaatttgatcttgccctgttcgagccattcgttcatctgtttgatgaattcgccgtagtgatgaccatagtcatcaaaaatgatgaacccctgcattctgatgcgtttacgtaaaatcagaccttgcaataacggcaggcgatctggcccgtcaggtaatgcggtggcgttatactgtgaaataatgccgcaaacaggaatacgtgcttgggtgtttagcagaggtaagaccgcatcgaatacggcaccgccgacgttttcgtagtaaatatctataccgtcagagcaggctttagctaattgctgaggaaaatcagtagattgatgatcaatgcagacgtcaaatcccagttcttctaccacatagcgacatttttctgtgccaccggcaatgccaactacacggcagcctttaattttcccaatttgtccaacaaccgaacctaccgcgccgctggcagccgccaccaccagtgtttcgccttcttttggctgacctatatccagtaatcccatataggcggtaaatccaggcatgcccaaaacaccaagtgagcgagaaggatgagacagtaatgggccaaggtttttcacattgctgccgtcagaaaccgcgtaatcctgccatccgttagcggacaatacccaatcaccgactttaaaatcaggatgttgcgaggcttcaacccgggaaaccgtgccgccaaccatcacgtcgtcaatggcaactggaggggcatatgatggggcatcgctcatgcgaccacgcatataaggatcgagagataaatagcgggttctcagcaagatctgtcctgccgctggctgagggatgtctatgatctctaaacgaaaattatccgctgtcggtgcgcctttgggtctggaggccagcacaatacgacggttatggattttatcttgaggcatgttgagttccttgctcgtttgacagatcggaatgaggtgtggctagcgcaaacctcgttaggtgctgcaaaaagaataatgggtattgcacaaaatgcctcaataaggcacagccgttatagcgggacgatcaggacatcaacgcggctggcattgattaatcgggttgctgagcaataaattttattcatcatgctggcgctatgatggccgcaaataaccaaatctatttgccgtttattactgacgtaattcaggctatccgctaattcgccgtggagaatggccatttcagcaatgggataattggttttggcctgtaactcagccataaataagcgagcttcttcctgtaacaggttgcgcagatcgcccagcattggcgctgcaaagttattatacatttccggttcggtagtcagcgtgaccaaagaaataataccgttatgtgggcgaacgattgaaaccgccttgtcgactaattgctggctgtccggcgaaagtgaaacagcaaccagtacattttgatatttcattattctctccactaaacaacatcatagctaaagagtaggggataggccggcttgaggatgagatctgcttcacagttaatctttttgttaaattcatagcataaaatagcgccaatcgtatgcaaaatgaccttataaacggtttttatgtgtaaattttacccaaaacgagattatacctttgcaaaaagtatgggtatgtaccacatttaataaattctctccaagcgcagtagacaatgacgctatctgaaatgttttgttacgtctgttgtggctttccagacctcttttggacatttttaaccgattattcctagctggttattattcgaacacttattaagtggctgctaatggtttttaatcgtcgcgattactcgggaaaaaatatagtttacttaagttatttatagttttgacgatcatttaatttacttaatagcgattaattctgggattcccgcctcatggcagatttatgctccgttattttggtttggtgatgtttttgttcgaattgatctaaaaaagctaagaattaggcttatatgattggattttaagacggtttctgacttgggcttgttttttaaccgtcaaattgatcaaaaaataagctagctacaccatatttcagaaaattatattttatttttgtgacttgtgtcacattacatttaaaataaatcactactcacgttgtatgtgccgacgattcgggagtagagttggccctctttaggaatattcctaatatttgtaagaaaagtttcatgaacatgacgcaataatagaacggtcgaaaaatactgtagcccaagcgtctgacatgaggctacgtaacaaaatggtttttttctgtgataccagtagtcttttaattacttttagttctatacgttttaataaacggtataacgggaaggatccctggtcatgggtgataaacaccttcacccaacttatgttttaaaacataatctgtcgggatgtataagatgagtacgtctgaattactcaaacatatttatgatattaatttgtcatatttacttttagcacagcgtttaattaatgatgagaaagcatctgccatgtttcgtttaggtatcacggatactatggccgacgcattatctcaattaacgttgcctcaaatggttaaattggcggaaaccaatcaattagtttgccatttccgctttaacgatcacaacactattcatcatctgacgaaagaatctcgcgtggatgatttgcagcaaatccatactgggattttattgtcaagccacttactgcatgagttatcgttgaaagacggtagtgcgtctaaaaaaagagcatgacgatggttgagaaaagtattgttcaggaagccaaagatattcatctcgcaatggagctgattaccttaggtgcgcgtttgcaaatgctagaaagtgaaactcagctcagtcgtggccgtctgattaaactttacaaagagctacgaggcagtccgccgccgaagggaatgttgccattctcgacggattggttcatgacgtgggaacaaaatattcattcatcgatgttttataatgcctacagtttcttactgaaaagtgggcaatgcaccggcgttgaagcggttattaaagcttatcggctctatttggaacaatgcccggatcgggtggaagagccgccgttactggctttgacccgtgcctggactttagtgagattcgttgatagcggtatgttgcagctatctggctgtagctgctgtggggggacttttatcacccacgcccatcaaccgcgtaacagttttgtctgtagtctttgccagcctccttcccgcgcagtaaaaaaacgtaaactttctccgcaacctgccgatataactacacaactgctggatgagcaggttagacgcgcagtttaagtgagatttgattgttagatttttgtcaggcaggcccggtatggatactcggtttgcctgatactagcgactttcgatggatcttaaactccgcaaaacacctcaccttccacccacacactttgctaaggatgtcacgtgttagttattttgggttatatcgtggtactaggtgcggtactcggtggctacatgatggtagggggccaccttggtgcgctctatcagccgtcggaatttttaattatcgctggtgccggtattggggcatttattgttggtaacaacggtaaagcgataaaagccacattgcgcgcaatgccgaagctattgcgcagatctaaatataacaaagtgctatatatggatttaatggcattgttgtatcggttattagctaaatcgcgtcagcaggggatgttgtcactcgaaaatgatattgaagatccccagcaaagtgaaattttctctaattatccccgtattctcgccgataaaatattagtcgagtttattaccgactatttgcgtttaatagtcagcggaaatatgaatgccttcgaaattgaagcgctgatggaagaagaaatagagaccttcgaacaggaaagcgaagtccccgccggtagcttggccatggcgggcgattcattacccgctttcggtattgtggccgcggtgatgggggttgttcatgccctggcttctgcggatagacctgcggctgaactgggcgcgttaattgctcatgcaatggttggtactttcctcggtattttattggcttacggctttgtttctccgctggcaaccctattgcgtcagcaaagtgctgaaacgaccaaaatgatgcagtgcatcaaggtgacgctgctttccagtctgaacggctatgcgccgcaaatcgccgtagagtttggccgcaaaaccctttacaccaccgagcgcccgtcatttatcgagctagaagaacatgtgcgtagagtgaaagctcctgcacctcaagcgacagaagaggacgcatgaagcatcagaatcaccccgttattctggttaagaggcgtaaaggcaaacatgggggaggccatcacggcggctcatggaagattgcttatgctgactttatgacagcgatgatggctttctttttggtgatgtggttactgtcgatttccagcccccaagagctgacgcagattgcagaatatttccgtacgccgttgaaggtggctttaaccagcggtgataaaagcagctccagcactagcccgatacctggcggtggtgacgatcccacccaacaacagggcgaagtgaggaaagtaagcaaatcggccgaagcccggcaggaagaaaatcggttgaataaactgcgcgagaagctggacgaactgattgagtccgatcctcgcctgaaagcgctacgtccacacctactgattaacatgatggatgaagggttacgcattcaaattattgatagtcaaaatcggcctatgttccagatgggcagcgcgcaggttgagccgtacatgcgcgatattctgcgggcgattgcgccaattttgaatgatattccgaataaaatcagtctgtcaggccataccgatgatttgccttatgccaacggtgaacgaggttacagtaactgggagctctctgccgatcgtgctaatgcttcacgacgcgaattgctgaccggcgggttgtcggaagggaaggtgctgcgggtggtgggcatggcgtctacaatggggttaaaggagcagagagccaccgatccagtgaaccgacgcatcagtattttggtgttgaacaaacagacgcagcaaagcattgaacacgaaaatctggataacaaagcgctggatattgagaaagctgaaggtttgaaacagctcgaatccagtgcacaacctgtcgcaggaacggagtccactgcaacggttgcaccgcaggccgcaccggccgtcgagccagctgtatctgcggtaacaacacaatctgcgccggttgctgagtcgccggtagtggggaattcagtggcagcacctgacgcaccggtagcgacaccgccggtcggcgcggatgtcactccgccgccggcagcagagccaccacaaccgaatacggagacggctacctcagtcgccactgggccaacaacatcgttgccagctgcacctgaatctcaagtacctgtctctccgacaagccgcgacgcacagtagaggtgacaacgtgagcatggatattaccgcgttttatcaaacattctttgatgaagcagacgaactgctggcagacatggaacagcacctgttattgctggacccattagcgcctgataatgaacagctcaatgcgatttttcgtgcagcgcattcaatcaagggcggggccgcaaccttcggctttaccgtgttacaagaaacaacccatctgctggaaaacttgttggatggtgccagacgcaatgaaatgcgcctgagcactgacatcatcaacctgtttttggaaacaaaagacatcatgcaagaacagttggacgcctataaaacctcccaagaacccaatcgggatagctttgaatatatctgtcaggcattgcgccaactggcacttgaagcattagaaccgacggctgcggctaacgcacctgcggcggctaacgaggctaaaaccacagcgaccccggctctggttcagggaggaatgcgtatttgcctgtctggcctgaagccacaggaaatcccgctgatgctggaagaactgggcaatctgggggaagtgaaagaccctcatcagggtgaaaacagcctggaagcgacgctgataacttcagtgagtgaagacgatatttgtgccgtgctgtgcttcgttttggaaccggaacaaatcagttttgtagaagcaccggcagtagcggacgttgttataccagcgacaaatgcacctgcggcaagtgcgccagcagtggaagcggcgcctgttacagccgctgcaccggtagcggaagcggtgaaaccggctccggctaccggcgctgagccagcgaaaccgcggccaaaagccagcgaatcaaccagtattcgcgtagcggttgagaaggttgaccaattgatcaatctggtgggtgaattagtgatcacccaatccatgttggcccagcgttccagcactctggatccggtagctcatggcgatctgcttaacagcatggggcagttggagcgtaacgctcgggatctgcaagagtcggtaatgtcgattcgtatgatgccgatggaatatgtattcagccgcttcccgcgtttagttcgcgatctggccagcaagctgaataagcaagtagaactgacgttattgggcagttctaccgagctggacaagagcctgatcgaacgcattatcgatccgttaacgcatttggtgcgtaacagtctggatcacggcgttgaaaatcctgaaacccgtattgcagcaggtaaatccccggtcggcaatctgacgctgtcggcggagcatcagggcggcaatatctgtattgaggtgatcgatgacggcgccggtctgaatcgtcaaaaaattctggctaaagcgatgtctcaaggcatggcggtgaatgaacacatgagcgatgaagacgtcggcatgttgatttttgcaccgggcttttccaccgctgagcaggtaacggatgtttccggccgcggcgtgggcatggacgtagtgaaacgaaatattcaggaaatgggcggccatgtgcaagtcagtttccaggcagggaagggcacgtctattcgcatcctgctgccgctaacgctggcgattctggacggtatgtcggtcaaagtgaatgatgaagtgttcattctgccattgaatgcggttatggaatctctgcaacctcaggcggaggatttacatccgttggctggcggcgagcgcgtattacaggtacgcggtgagtatcttcctttggttgagctataccgggtgtttgacgttcctaatgctaaaaccgaagccactcagggcattgtggtgattctgcaaagtgcaggccgtcgttatgcgctgttggtcgatcagttgattggtcagcatcaggtggtagtgaaaaacctggaaagtaactatcgcaaagtgccgggtatttctgccgcaaccattctgggggacggcagcgttgctctgatcgtggatgtttctgctctacaggcgttaaaccgggaaaagcgtgtatccgttgaggatgccgcgtagccagtccgaatatggacacaggatgccgactaaggttggcagtcctgaatataagcataacaatctattcacgccgtgcggttagttgagtttaatcgcgctggccgggctaaacggcttcgtggaatagattataaattcaacctattgattgaagggtagaaacatggcaggactagcaaccgtcactaaattggctggcgaaacggtaggacaagaattcctgatttttacgctgggtgatgaagagtacggcattgatattctgaaagtgcaggaaattcgcggttacgatcaggtcacgcgcattgcaaacaccccggcgtttattaaaggcgtcaccaacctgcgcggcgtcattgtgccgattatcgatctgcgcgtgaagttcgcgcagaacaacgtgtcttacaacgaaaataccgtggtgatcgtcttgaatttcgatcagcgcgtggtgggtatcgtggttgacggcgtgtccgacgtgctgtcattaactaacgagcaaatccgcccggcacctgagtttgccgtgactctggcaactgaatacctgacgggccttggctctctcggggaaagaatgctgattttggtggatatcgaaaagttgttgagtagcgaagaaatgtcgttaatcgacagcgttgcgaaaggttaagtagataccagcgggggaaaccccgcttttttacaggtgaataccgtgtctgccgctcaatagctcccttcaggtgccgcaaaataatagttgtgccctcaggtaaagttccccctgccgctgccgataacacatgtaattgacgtacttttgatttgacgtacttatgaagggataacatgttcaagcgtatgaaagtagtcaccagtttattgctggtgttggtgttatttggtgccttacagcttatttctggcgggcttttctttaatgccctcaaaaacgataaagaaaactttgccgttttgcaggttattcgtcagcaacaatcttcactgagcgatagctgggtcaatctggttcaaacccgaaataccctgaaccgcgcggggattcgctatatggcggatgcgaacggtaccggtagcggtacgccgttgcctgagttgttgaccttggcgaaagacacgctggttaaagcgcaaaaaagttacgctgatttcgaacagattccagtggatagccgacagagcgctgaaagtacccaacgcatgaaacagacttacgatgcatacgtaggcgcgttggccgaactgatccagttaatggaagccggcaaaatcaaagagttcttcgatcagccgaccaccagtttccaggacgcctttgaaaaagattacaccgcttaccgtatgctaaacgacaacctgtatgcctcagcggtagaagacagtaataagtcattcaccgttgctatgggtatcctgattgcgattctgatcgcggtagtagcagtgatgctgatcgtttggttcggtatccaacacattctgattaatccgttaaatcgtttgattgaacacatcaaacacatcgctggcggtgatctgactcagccgatcgaagtgctgggtcgtaacgaaatgggcgcgttggcagccagtttgaaaaacatgcagtcagagctgatcaacaccgtgagcggcgtgcgtatgggtgccgatgctatttatagtggcgcatctgaaatcgctgcgggtaacaacgatttgtctgctcgtactgaacagcaggccgcttctctggaagaaaccgccgccagcatggaacagctgaccgcaacagtgaaacagaatgccgaaaacgctcgtcaggcaagccaattggctctgagcgcctctgaaaccgcgcaaaaaggcggcaaagtggtggctaacgtggtgcaaaccatgcatgacattgccggtagttcacagaagatcgccgatattaccagcgtaattgatggtattgctttccagaccaacattctggcgttgaacgccgcggtagaagccgcgcgcgccggtgagcaaggtcgaggcttcgcggtggtagcgggtgaagttcgtaacctggcgcagcgtagtgcacaggcggcaaaagaaattaaaggtctgatcgaagactcggttaaccgggtagacatgggctccgtgctggtagaaagcgccggggaaaccatgggtgacattgtgaatgcagtgacccgcgtcactgacatcatgggcgaaatcgcttccgcctctgatgaacaaagtcgcggtattgatcaggttggtcaggcggtgacagaaatggaccgcgtaacgcaacaaaacgcctcgttggttgaagaatctgcttccgccgctgcggctttggaagagcaggccagcctgctgacccaatcgatgtctgttttcatcctgcgggtggataacggtaatagtaataaagatgtgagaagaaccaagcagccggtagtggaacagaccggtactgctaaaaaaacactgggaagtgacctgcaagagaattgggaaactttctagaccctacaaaatataatattaaaagccggccttagagccggctgagaagaggttacgatgtttggccgaatccggatttctaccagctttttcctgttactgatgatgatttgctctatacagttgatatcaagtggtctgtcgtttactgcttttcgtgcagacaaccaaaatctcaaccgagtggatctgagtagccagcaacgggatgcattaagcctgagttgggtatccttgcttcaggctcgtaataccttaaaccgcgcggctacccgggcggctctcaacgtaccacaggaaaaggtcaacgaattaatgggcaatgcccgcagttcgttacagaaagcagatctctactttaaccaattcctggctgtaccccgtgttgatgccagcgccgttgaattaaccgacgcgacacaagccagctatcagaatttacgcgcggcgctgcgggaattgatcgtgttcctcgaagccggcaagttacaagagtttatggatcaaccgacccagaaaactcaggatctgtttgaagctgattttgtgcaatacctacagcatacctctgaaattattgccgaatctggccatgaaaatgggcaggcttatttgctttccaaatggatttttgctggtgcaattgtgctggtgatttctatggcgatttcttgcctgatctggctgcgtaccatgtttgtgacgccgctggcgattatgcgtgagcattttgaccggattgctcaaggcgatttagcgggcaatatttcggttaccgggcgtaatgaaatcagtcaattattcggcagtttgcgcattatgcagcagtcgctgattagcactgtgagtaaagtccgagacggcaccgaatcaatgttgaccggtattcaggagatttccgcaggtaataacgatctttccgcccgtacggaacagcaggcggcttcgctggaagaaaccgcggccagcatggagcaattaaccgcaacggtaaaacagaatgcggataacgcccgtcaggcaacgctattagccaaggatgcttcggcaaccgccgctaaaggtggcgctctggccagcgacgtggttagcactatgcacgaaatcgctgcgagttctcataaaatcggtgcaattaccagcgtaatcgacggcattgctttccagaccaatattctggcgctgaacgctgcggtagaagcggctcgtgccggtgaacaaggtcgcgggtttgccgttgtcgccggtgaagtgcggaatctggctcagcgcagtgcgcaggccgcaaaagaaattaaaggactgatcgacgaatccgttggtcgcgtgcgtcagggctctactttggtagaaaactcaggcaccaccatggaagaaattgtccgctctgtaacaagagttaccgacattatgggggaaattgcctcggcttcggatgagcaaagccgcgggatcgagcaggtttcgctggcggtcacccaaatggatcaggtaacacagcaaaacgccgcattagtggaagaggcagcttctgcagccaacgcattggaagagcaagcaggttatctctcccatgcggtgtcagtcttccgtttggcgcaagatggctacgatggggattggcaggaggctacaggtgcagataagcaacctgttgttaaggaaatctcagattgttaaacggcgtagcatgtcattttttaagggtgaggccggatgaaaccatctcctaagtcaacccccccagattctgggtcgatattaaaccagatggtacaacggttaccgctgtcggatgtgcatttccgacgtatctgccagctgatttatcagcgggcaggtatcgtactggccgatcataagcgggaaatggtttacaaccgcctggtgagacgcctgcggttgctgaatattaatgattttggtcaatacctggcgttgctggaaaccgatccgaatagcgcagaatggcaagcgtttgttaatgctttaaccactaacctgacggcttttttccgcgaagcccatcattttccgattttggctgaacatgctcgccagcgaccagggaattattcggtctggagtaccgcggcctcgacgggagaagaaccttattctatcgcgatgacgttgagcgataccttagggcatcgtgccggtagctgtcaggttttggccagtgatattgatactcaggtattggaaaaggccaccagtggcgtttatcgacaggatgaattgcgctcgctttctgctcaacagatgcagcgctattttttacgcggaaccggccctcatcaaggcttggttcgggtacgaccggaactgtctaatatgctgacttttcagcagcttaatctgttagcgccagaatgggcgctgccgggacagttcgacgcgatattctgtcgtaatgttatgatttattttgataaagagacgcaggaacgcatcttgcgccgctttgttcctttgctaaaacccggcggcctgatgtttgctggccactcggagaatttcagtcaaatcagtcgggaattctatttgcgcgggcagaccgtttatggactgaccaaggagaggtgatgagtaaaatcagagtattgtgcgttgatgattcagcattaatgcgccagttaatgaccgagattattaatagtcacccggatatggaaatggtcgctacggcgccagatccgctggttgcccgtgatttgatcaagaaatttaatccgcaagtactgacacttgacgttgaaatgccgcgcatggatggcctggattttcttgaaaaactgatgcgactgcgacctatgccggtagtgatggtttcgtcattaactggtaagaattccgaaattactatgcgagcgctggagcttggggcgattgatttcgtcactaaacctcaattgggtatccgcgaaggcatgctggcttatagcgagctgattgcagaaaaaatccgcaccgcggcgaaagcccgtttgccacgacgcattacggataatgcgccggtcatgctgagtcatgctccgctgctgagtagtgaaaaactgattgccattggcgcatccaccggaggaaccgaggcgattcgtaccgtattgcagcctttgccgccgaccagtccggcgttgctgattactcagcatatgccaccgggatttacccgttcttttgccgaacgtttgaacaagctttgtcaaattacggtaaaggaagcggaggacggcgaacgtgtgttaccgggacatgcttacatcgcaccgggggatcgccatctggaactgacccgcagcggcgcgaactatcaggtacgtattcacgatggcccggcggtgaatcgccatcgcccgtcggttgacgtactgtttcgttccgttgcccagtgcgcggggcgtaacgccgtcggcgtgattttaaccggtatgggcaatgacggtgccgccggtttgctggaaatgcatcgggctggcgcatataccattgcccagaacgaagccagttgcgtggtgtttggtatgccacgtgaagccatcggcatgggtggcgtcaatgaagtactggatctgaaccaggtaagccagcgtatgttggcgcagataagcagtggtcaagccttacgtatctagggatcggcttcagattttaatattccggtgtaaatcggcttttgttttcaatagctcagcggtgagcaacaaaccttaggagtaagtatggcggacaaaaatctcagattcttagtggtagacgatttttcgaccatgcgtcgtattgtcagaaacctgctaaaagagctgggctttaacaatgtggacgaagctgaagacggcgtcgacgcattgaacaaattacgcgcaggcggttttgattttgtggtttctgactggaacatgccaaacatggatggcctgcaattgttgcaaaccattcgcgcggacggcgcgctcgcagctttaccggtgctaatggtgaccgcagaagccaaaaaagaaaatattatcgcggctgcgcaagcgggtgccagcggttatgtagtgaagccttttactgcagcgaccttggaagaaaaactcaataagatctttgaaaaattgggcatgtaaggagtcgagatgaataaccatccaatgcccgcaactgatgcggcatcagccagtgatataatcagccggattggtaatctgacacgtatgctacgtgacagcctgcgtgagctggggcttgatcaggcgatagctcaggcggcggaagcgattccagatgcacgcgatcgtctcgactacgtggttcacatgacggcacaggcggcggaacgtgcgctgaactgtgttgaggcggctcaaccacgccaaaacgagctggagtcatcggctaaagcgcttaaagttcgctgggatgaatggtttgccaatccgatcgaattgtctgatgcacgttcactggtcactgatactcgcgaatatctggatttggtaccagaacacacttctttcaccaacgcgcagctgttggagattatgatggcgcaggatttccaggatcttaccggtcaggtgatcaagcgcatgatggatgtggtgcaggaaattgagaaacagttattaatggtgctgatggaaaatattccggaacaaacggcaaaacctcagccagtcaatagtttacttaatggccctcagctggataaaaacggtgcaggggtaattgcaaaccaggatcaggttgatgatttactggatagcctaggtttctaagctgacggtgaacgtttaaatgcagatgaggacatttccctcatctgcaatttactgcttggccatcattttgactggttatccaactgaaaaatggcgcttcactcgttgtcacagatttatagtacgtccctcacttcttcctgcctgcatttggctaacaacactgccttttccgcattgactcgcccgtagccataccatttgctgtgcccatttttatcatatttgccatttttccgatcaatcttatcgcaggagtcgcggatgatatctctgacctcaaggtaggtgagcgatggattgacggacagaatcagggcggccacgccagcggcgccggggcaggaactggaggtgccgccgaacttgttggtgtaattaccaaagagatcgccggttagcgtcataccggtattatacccgtcctgattacgtacatcggtggtccagatgccggaggtgagtggggcggggtggaatttctcaggatgggcgaaatccccgctggggaaggtacaccacagcgctttgccgaagtcactgtaggcgcagcgggtgctgcggtcattacaggcaccaacggctatgactttgtcattactggcgtaaccgttattatcgaccgattcattaccgttgcctgcggcaaagaaaaccgcgcaccctttcccgttacgccctttttctaccgcatagtctatggctagacgcgtaagcgccggtaattcggtttctctatcgtgatattcatcatcaggatcaaaccaaataccgtcggcgggcccccaactgcaagaaatgatatccgcgcctttatccgcagcccacacgaaagcgagagcttcccccatggagcctaagccatcgaccagacgaataggcatcagatttgcctccggtgctacgccggatgcgccatacaaaccatcggcgcaggccacgccggcgcaggcggttccgtgtcggttacttttatccggcaagggattttcattctcataacccatttcatagttatggggatggacgactttacccggccgcataaattcagggtgctgaatatcaaagccatcatcaataatggcaatggtgatacccgcgccgcgtgttatttcgtgggcggcttcaacgttagcgctggcgtcgacatccgtttctgttctcacggtagttttcttcaaatgccattgattggggtgaatcgctttaggcattttttggtgaattaattcaggatgacaatattccacttcttcacaattcagtatgtcctccgcgagagtaaatatatcatcgccggtatcttctatggctgaaataaaataggcgtttttaaggaatgaaatttcattttttataataagattgtatttattaatgatatattcacattgggttttttttatgtcatttttgaatttgataaagatattttctgtataaacgatcggctcagcagtttgttcattcctaaaaccgaaaccggcaaatctgacatcccgatcggtggaaagtttttctctcaattcattgataacgttttcttccccttcaaccctaaccacatagacgtttacattactgatattaaacaataaattgtaatgtaagggttcgtctttaatgattttatccattgtatcggaaaattcttttccagctttcattcttacaataagtaaatcgccggatttaaccaaaggtaaaatttttctatggttatctttaatgtcataagtaacgtcaaatcttttcatttcaaatcctttttgattgaattggtcatcggtttattatgctaacagtgaatgttagttattcttggttaatggttttgatataattaatcactcccaacttctatttatttatatcacctggaacctgtcttttacataaacgcctcgctaatgactatcaggcgtttatgacgggatattcattatcattagctagcctaagcgttatttttgctaaaaataaaatgataaaaccgaatgcagcgttgaattttcaactggcgatatctccctgtggcttaaaaattatgcgtggagcgaggcgaagcccatcgccttatcagagaaataaccgcctaattgctgctttgttccgtccatcaccccagaaaaattttgtcatgctagcggcaattatttttcctttaattttttattcttaacaggaacgcccaagctgaacagggacactgactgtggctgaagatagcgatctggaaaagagcgaggaacccacagcccataagctggagaaggctcgcgaaaaaggccagattcctcgctcgcgcgaactgacctcgatgctgatgctcggggccggtttgtcgatcctgtgggtttttggcgaatccatcgggcggcaactggcggcgatgatcgcgcagggattacagtttgaccacagcgtgattggtgatgaaaagcatatgctgcgacagattggcatgctgctgatgcaaaccgtgacggcgctgttaccggtatttattggattggtattggtcgcgctgtcggttccgatgttattgggcggcatctcatttagcgccgaatcctttaagttcgatttaaaacgtatgaatccgctttccggcttgaagcgcatgttttcttcgcaagtgctggccgaactgctgaaagcgattcttaaagccacgttagtcggttgggtcaccggcatgtttttgtggcactactggcctgacatgctgcggctgatagcggctccgccccttgccgcactgggtgatgccctgcgtttgattttgttctgcggttttatcgtggtgttgggcttaacgcctatggtgagttttgatgtgttttatcaaattatgagtcatatcaaaaagctccgcatgaccaagcaggaaatacgcgacgaattcaaggatcaggaaggggatccgcacgttaaaggacgtattcgccagcagcagcgcgcaatggcccgtcgccgcatgatggccgatgtaccgcaggcggatgtgattgttaccaacccgacgcactatgcggtggccttgcagtataacgagaacaagatgagtgcgccgagagtgttagccaaaggtgcaggagaaatagcgttacgaattcgtgagttaggtgctgaacaccgcatcccgatgttagaggcgccgccgctggctcgtgctctgtatcgtcatagtgagatcggtcagcatatcccggccaccctgtacgcggcggtggcagaggttcttgcctgggtttatcagcttaaacgctggaagctggaaggtgggctgattcctaaaaaacctgaaaatctaccggtgccggatgcactggattttgctggagagagtgagactaatggctaacttggccgccctgcttcgtttaccgggcaattttaaagacacgcagtggcagatacttgccggtccaattctgattttgatgattttgtcgatgatggttttgccattgccgccgttcattctggacctgctgtttaccttcaatattgcgttgtccatcatggtattgctggttgcgatgtttactcagcgcacgctggagtttgccgctttcccaactatcctgctgttttctaccttattacgcttatcccttaacgttgcctcgacccgaatcatcttgatggatggtcataccggtgcggcggcggcggggcgggtggtagaagctttcggccacttcctggtgggcggtaactttgccatcggtatcgtcgtgtttatcattctggtggtgattaactttatggttatcaccaagggtgcaggacgtattgccgaagtaggcgcgcgctttgtactggacggaatgcccggtaagcagatggctatcgatgccgatcttaacgccggtttgattggcgaagaggaagcaaaaaaacgacgttctgaagttacccaggaagccgatttctacggttcaatggacggtgccagtaagttcgttcgcggtgatgccgtagccggtttgctgatcatggtgattaacgtgatcggcggtttgttggttggggtgatgcagcatgatatggccgtgggccacgccgcagaaacctataccttgctaaccatcggtgacggtctggttgcgcagattcctgccttggttatctctactgctgccggtgttatcgtcacccgcgtgagtaccgatcaggacgtgggccagcaaatggtcacccaactgttcaataacccgcgcgtgatggtgctgagcgccagcgttctggggttactgggcatggtgccgggaatgccgaactttgtcttcctgttgttcaccgcggctttactggctttggcctggcgtttaaagggcaaacagaccagtcagcctgcggtggcagaacagcccgtggtgcaggatcagcagcaggctgccgaagcgacttggtcagatgtacaactggaggatccgctgggcatggaagtgggttatcgcctgattcctatggtggatttccagcaaaacggcgaattattggggcgaatccgcagtattcgtaagaaatttgcgcaggaaatgggctatctgccgccggtggtgcatattcgggataatctcgaattgccacctgccagctaccgtattctgatgaaaggggtggagatcggcagcggcgaagcccatccggggcgctggctggctattaaccctggcaatgccgtgggaacattacccggtgaagcgacacaggatccagcctttgggctggctgcggtctggattgagagtgctttgcgtgagcaggcgcagattcagggctttaccgtggttgaggccagcaccgtggtggcgactcacttaaaccatttgatcagtcaatatgctagcgaattattcggtcgtcaggaaacgcagcagttgctggagcgtgtgtcgcaggaaatgcctaagctgacggaagatttcattccgggtgtggtgtctctgacaattttccacaaagtgttgcagaatttgttgtccgagcgggtgtctattcgcgatatgcgaaccattattgaaacgctggcggaacatgcgccgaaccaaaccgatccgtacgagctgacggcggtagtgcgcgtggcgctgggtcgttcgattgcacagcagtggttccctggtaccggagaaattcaggttatcggtctggatgcggcgttggagcgtttgttgttgcaagccttgcaaggtggtggcggtttggaaccgggtctggcggatcgtttgctggatcagtcgaaacaggcattgcagcgtcaggaaatgttgggcgcaccgccggtattgctggttaaccacgcgttgcgtgcgttgctggctcgcttcctgcgtcgcagtctgccgcaaatggtggtgctgtccaatctggagattggcgacaatcgtcaaattcgcatgacatccaccattggagccgcctaatgaagtttcatgctttggttttagccgcgttagcgtcagtgtcgtggggcgcttacagtgcttccggcagttgggttgccgatgatattggtgtgacgcagaatttacgtggcgtgccgacttcatcgccggtattgcgtccgaccacgccttatgtcaccgcggagcatcgcattgtgtcggttagctggcggatacagttgctttccgccgctcccaatggtctgcaaatgaagctttgttccccctctcgttgtattgatttgaacggcggtagcggttccagccggggtctggcgggtgagtctgcaaccagtccgttgacttttgtctatctgattcaagggcaggggcgagtgaatccgccgttacaggtgatgagtaaccaggtgatagtgaattatcaatagaattccctttttaaggtaaacagattcagattgccaatatctttcaattgagccgcttttcagtggctctaaattgaggatatttacccttttctatcagattcaccttagagtaataaaagataaatataaaactggagccgatttttaaagcctcgtcgttcggcttttccctcgctttcttattgtgttttcccatctaagtcagacgaagattaagttcggatctggtttcgaaagcccggtagctcactgtttcctccctcgtgcactcttcgtccggtgagccagcgctagattcagcagcgggcgcatcctgaccctacggctcaaagcgctttaaacaactgccggctgttcactctggttcttatcccggcttggcctacttcccgattgcgccttgttaaaattaaaaccatttttcttatgagtcataatttgtctttcgccgttgatatggcttttgaccttgagcttgacctttcagagcgcatttgagttgtcgaatgaagaatgcaggcaggacgcgaagcatgggcgccgcgcttgaacaggcgcgaatcgcggcgttccgtcaaccgaaatttgatccggcacccaattttcatcaggcttgtgatgttgaccagaagcgttatctgaaaccttcagcaataacaatcaatagatgagtgagagtcagatgggtaagttaccttgcggtagatgtaacgacccggaaggaacacagtacaagaaaaatattaattttatgaagaataataacgtgaaaaaccagaggaaattagaaaggaaaaaattcacctttaacggtgatgcgtgacgaacgccaccaccgtcagataatcagctcaaaaatcaaccgcaggttgaagtttaaacgccgattttacgccccagcaggctagcgccgcgggactgaccatcggggccatacagagactgaccgtggcgcgtattcaataccgccagcgcctcatcattgtgcgcgatgtgctgattcagcaaaaaaccgttgtgcaaattggtataacgcatcttttcggcttttttcaggattcgctcccagcgctctgtcagcgcaggaacttgctgataaggggctttgattttggccgctgtttctgccgccagacggttttgatccagataatccagagtcgctaataacgaacttttttgctcggttatcccttgcagaaccacgccgtgaattcgcccgtcgcacagtaatcgctgctcttcagcaataaccacggacagggtatctaaacattccagctgttgatccagattggtctgtaatctttccaccgccacttatccttacacaattaactatttttaagataatccgcagcgtcttttaacagggcatcggcaattttaccggtgtccatggtcagttggccggagcgaatagcctgtttcaaactttctacacgttctacattaatatcctggctgcccggttgcatcagcttggcttgcgcgtcgctgagtttaacctgcgtgccgctaacttgcgctttagcctgggtagacttacgcatttgctgcgctgcctcgctggtttcgcgcggttgtaccgggctgaccggcaccagtggctgtgtgcgatcgatgctcatggtgttactcccttcatggcgggatttagattagtgacccgcaaactggtggcgggatttacgctaattcacccgcgaataactgcttgttaatggttatcggcaacgatgataaaaactttaatcactataacataatgcgaataacgccatcgtcacccaaggtgccactgacgatttgacccgacgccatacgcacccgaacgttatcctgaagggcggcgttgttcatcgccttgccttcgctattgatattaaagccttctccctgcgcgacaacctgaaccgcctgaccggccttgatcacccatgagcgcctgagcatggccttggtcagcggttgtccggcattaatatggcgtaaactgatcgtacccttagcaaaacgtgcctcgtttaacgcgccttgcggcaaggtgtccaaccgtccttccttataagccatgtctttttctgccagcttctcaccggcagtgatctggcggctggccaccagatatttccccgtgacctgcacctgcgtctgcataaaacgccgttgctgaccacagcgcaccgacaaactgacgttaccccatgggcgcgcgttggccggtagcgagatttcgggattttcacactgcggccattgagcctgtggcgtttttattttcacttcaacctgccgggtatccgaggggaattggctgtgaaagaactggtcaatctgttcggccagatccgttgcctgcgctgttcctacacacagccacgccaagcctaacccgatgacaccgcctgctttcatggaatcccctacgtcttgaggccgatttaatggcccgatagattgactgcttccccactagtgtacctgtagctgaaaagggttaaggggataaatagcgacgcattttgcccttattcaaacgataggctttccctaacgccgtttatgctgtcgactccaaattctaacctcgcgggggggctatgctcgacaaactggacggtgctctgcgctttcaacaagaggcgctaaatcttcgcgctcagcggcaggaaattttgtctgccaatattgccaacgccgatacgccgggctttcaggctcgcgatatcgatttctccagccaactgcaaaaagtgatggagcaagggcgtgttaacggcagcgggatgtcactcagtttgaccgcagcccgtcatattccggctcaaaatattcagccgccggatctggatctgctattccgggttccagaccaaccctcgatggacggcaacacggtagatatggaccgtgaacgtaccaatttcgccgataatagtctgaaatatcaaaccgatctgaccattcttggcagccagatcaaagggatgatgtcagtgttacaacaaggataaggcgtatgtctttactgaatatatttgatatcgccggttctgcgttgtctgcgcaatcccagcggatgaacgtgagcgccagtaacatggccaacgccgacagcgtaaccgggccggatggccagccttatcgcgcaaagcaggtagtgtttcaggttgccaatcaaggcgctcaggaaaccggcggcgttcgtgtcgcacagatcgtagaagacacggctccggatcgtttggtgtatcagccgggtaatccactggcggatgccaaaggctatgtgcgtatgccgaacgtggatgtggtgggtgagatggtgaacaccatttccgcttcccgaagctatcaggccaacgtggaagtgctgaataccactaaatccatgatgctcaaaacgctgactttgggccaataatcggagccgacaatggcaattaatacctcaatgaatgacagcttggacaacactattcccaataccgctgccaagcttcagcaaaaacagactctcggcggtgctggtagcagcgaagagatgcaaaacagctttctgacgctgctggttgcccagttgaaaaaccaggacccaactaatcctctacaaaacaatgaattgaccactcagctggcgcaaatcagtacggtacaaggtattgagaaactgaatacgaccttgggttcgatttcaggtcagattgataacggtcaatcgttacaggctagtgcgctcattggccacggcgtgatggtgccgggcaacagtattctggccggttcgaaggacgacatcgtgagtacgacgccgttcggtatggaactggtgcgcggagccgacaaagtgaccgccactatcagcgataccaacggtaacgtggtcaaaactattgaattccctggtggtttagaggcaggcgttcatgtctttacttgggatggcaagctggaagacggcagcaacgcaccggatggcgcctacagcgtcagtatcgccgccagcagcggtgtggagtcactgaacccaacggcgctgagctttggcgtggtgaacggtgtcaccaagggcgctcagggtaccaagctggatctcggcccgcgtggcaccgtgacgatggatgaagttcgccagattctgtaagtccgctgcttcgtgcacggaaggcattttgataaagcagtgggccagacaagagtttggttctctcatttacccggcgttttgatgttgtatcaacgccttgaatcctaacggagagtaacatgggtttttctcaagcagtcagcggtttaaacgcagcgtctagtaatctggatgtgatcggtaacaacattgccaactcggctacctctggttttaaagcaggttccgtatctttcgccgatatgtttgccggttctcaaaccggtatgggcgtaaaagttgccggtatcactcaggacttcaacgacggtaccccaaccaccactaaccgtcgtttggatctggctatcagccaaagcggtttcttccgtatgcaagacagcagcggcggtattttctacgcgcgtaacggccagttcaaactggatgaaaaccgtaacatcgttaaccagcaaggcttgcacctgaccggctatcctgccacaggtacaccgccaacggttcagcagggtgctcagccgattccgctgacgattccacagggcatgatcagcgcgaaagcgaccacttccggcaacatggtcgctaacctgaattcatctcacaagccaatcaccgaaacttttgatccggctaagcctgatacttatagcttcgtcaacaatatcaccaccttcgatagtctgggtaacagccacgatgtcagcgtgttctttgtgaaaaccaaagacaacacctgggacgtgtacacccaagacaccagcgtggccggttctaaagccgacaagcaaggcaccatgaacttcgataccaacggtctgctcaccggcacgaccgatggggcaggtgctccaagcgcaacgccattcactctgaatgtgccaatgtccgcattgaatggtgcgccagcgcagacgtttacactgaatctggccggtgccaagcagcagaataccggtactgacagcatctcagcccagaaccaaaccggctatgcggcaggtgagtttactggcttccagatcgaaaaagacggttccgtgatcggtacttactctaaccaacagaaacagctgctgggccagatcgtactgactaactttgctaacccagaaggcttgtcttcacagggcgataacgtttggaaagaaactgcggcttccggtaacgcgattctgggtacggcaggcggtggtggtttcggtacgctgaccagcggtgcgttggaatcttccaacgtggatctgagtaaagaactggtaaatatgatcgttgcccagcgcaactaccagtccaacgcccagaccatcaaaacccaggatcagatcttacaaactctggtcaacctgcgctaatcgcgctaacgggatagcagcatggatcacgcaatatataccgcgatgggtgccgcccggcagacgctggagcagcaggccgttaccgcgaacaatctggcaaatgcttcaacgccgggcttccgcgcgcagttatctgcgttgcgagcagtaccgattgacgggccgagcatggcgacgcgtactttggtggcggcatcgacgcccggtgcggatatgagtcaggggccaatgaactacagcggtcgcccgctggacgtggcgctgcagcaagacggttttatggccgtgcagttgccagacggcaccgaaggttatacccgcaacggtaacattcaggtttctgccgacggtcagatgacggtgcagggttatccgctgatgggggataacggcccgattgacgtcccgccgcaggcggaagtcacgatcgcggctgacggcaccatctcggcgttgaacgcgggcgatccgccaaacaccattgctcagattggccggttaaaactggttcaggcgcagggcagtgagctgacgcgcggcgatgacggtttgttccatctgacgccggctacgcaacagcaacgtggtgctacgttgccgaacgatccgctggtcaaagtgatgcctggcgtgattgaaggcagcaacgtcaaaccggtggaaactatggtggatatgatcgccaacgcccgccgttttgaaatgcagatgaaagtcattcacagcgtggatgagaacgaacagcgcgctaaccagctgttagctatgagttaagcgcccaggcgcagaggagtacactgatgatccgctcattatggattgccaaaaccggtttagatgcccagcaaaccaacatggacgttattgccaacaacctggcaaacgttagcaccaatggctttaagcgtcagcgcgccgtgtttgaagatttgctgtatcaaaccatgcgtcagccgggggctcaatcttcggaacagactaccttgccgtccggcctgcaaattggtacgggtgttcgtccggtggccaccgagcgcctacacagccaggggaacctgtccaagactgataacagtaaagatatcgccatcaaagggcaggggttcttccaggtgcaattgcctgacggcaccaatgcctatacccgtgacggttcattccagatggatcagaacggtcaactggtaaccgccggtggttttcaggtgcagcctgccatcacgattcctgccaatgccttgagcatcacggtagggcgtgacggtatcgttagcgtgactcagcaggggcaaaccgccgctcagcaggtcgggcaactgacgttgactacctttatcaacgacaccggtctggaaagcgtaggcgaaaacctgtatcaggaaaccgccagctccggcgcaccgaatgaaagtacgccgggcctgaacggcgcaggcttgctgtatcagggctatgttgaaacctctaacgtcaacgtggcggaagagttggtcaacatgatccagacccagcgcgcctatgaaatcaacagtaaagcggtaacaacttctgatcagatgcttcaaaaactgactcagatctaagatagctttcggggggctggattgccccctgactgcgttaggccgattggaattttggggttcaaggcagcttacccctttggttacaggtaataaaaacagagatggatacttcgccgttcagaaaattaagtggattgagatgggtctgtgcgccaacaatggcggtgctgctgctcaatggctgtgcgtatattccgcataaaccactggtggatggcaccacctctgcgcaacccgcgccagcgagtgcgcccttgccgaatggctcaatatttcaggctgttcagccgatgaactatggctatcagccgctatttgaagaccgtcgcccgcgcaatatcggcgacacgctaaccattaccttgcaggaaaacgtcagcgccagcaaaagctcttctgccaacgccagccgtaacggtgccagcaaatttggcgtagccactgcgccgcgctatctggaaggtttactgggcaacgcccgtgccgatctggatatttccggcgatagcacctttggcggcaaaggtggagccaatgccaataacacctttaacggcactattaccgtgaccgtggatcgggttctggccaacggtaacctgcatgtcgtgggggagaagcagattgcaatcaaccagggaaccgagtttattcgtttctccggggtcgtcaatccgcgcaccatcagcggcagcaacaccgttacctcaactcaggtggcggacgcacgtatcgaatacgtgggtaatggctatatcaatgaagcgcaaaccatgggctggttgcagcggttcttccttaatgtttcgccgttctaagaggccgattaatgcgtaaacaatctctcatcccgctttttgccgcactgttgtcattggtgtggctgccggcatcggcagagcgaattcgtgatttggttaccgttcagggcgtgcgggataacgccctgattggctacgggctggtcgtggggctggatggctccggtgaccagaccatgcagactccctttaccactcaaagcctgagcaacatgttgtcccagttagggattactgtgccgccgggcaccaatatgcagctgaaaaacgtggcggcggtgatggttaccgctaaattgcctgcgttttctcgcactgggcaaaccatcgatgtggtggtttcttccatgggtaacgccaaaagtattcgcggtgggactttgctgatgactccgctgaaaggcgtggataatcaggtttatgcgttggcgcagggcaacgttctggtcggaggcgcaggggcgtcttcaggcggcagcagcgtaaccgttaaccagttgaccggtggacgaatcagcaatggcgcgaccatagaacgagaattaccgactacctttggcagcagcggcgtgcttaaccttcagttaaataacgaagattttacgctggcgcagcagataagcgatgcgataaaccgttcgcgtggcttcggttctgccaccgcgattgacgcccgtaccattcaggttctggtgccaagcggtagcagctcacaggtgcgtttcctggccgatattcagaatattccagttaatgtcgatccgggcgatgccaaggtcattatcaattcccgcaccggctcggtggtgatgaaccgtaacgttgtgctggattcttgtgcggtggcgcagggcaatctgtcggttgtggtggataaacaaaataccgtaagccagccggatacgccgttcggcggcggtcagaccgttgtcacgccaaatacccagatatccgtacgtcaggaagggggcgcgctgcaaaaagtgaatgccagcccgaatctgaacaacgttattcgcgcgctgaattctctgggcgcaacgccaatcgacctgatgtctattttgcaggcgatggaaagcgccggctgtctgcgggctaaactggaaattatttgatgagcgatttgatggccatgtccggggcggcatacgacgcccaatccctgaacgccttaaagcgtgatgtggcaaaagatccgcagggcaacctaaaacaggtggctcagcaggtcgaagggatgtttgtgcaaatgatgctgaaaagtatgcgttccgccatgccggaagacggcccgctgagcagcgaccaaacccggctctatacctctatgtatgaccagcagattgcgcaggaaatgtcggtgaaaggtctcggcctggccgatatgatggtgaagcaactttccggtagccagtcgccaagtgaaacggccggtactgtgccgatggcgctggataaagaagtcatgcaaaccctgccggcgcaggcgctggcgcagatgatgcgtcgggcaattcccacgccgccgccggaaggtaccagcccgctgtcgctcaataacaataactttgtttcgcgtttgtcgatcccggccaaaatggccagccaacagagtggcattcctcatcaactgattgtggctcaggcggcgctggaatcaggctgggggcgccgcgagatcccgacggcggaaggcaaatccagctacaacctgtttggtattaaagcaggcagcaattgggaagggccggttagtgaaatcacaaccactgagtacgagcaaggcgtggcgaagaaaaccaaggccagcttccgcgtttacggttcttacgtcgaagcgattagcgactacgtcaaattgctgaccaaaaatcctcgctatgcggaagtggcggcggcgaatacgccggagcaggcggcacatgccttgcagcgagcgggttacgcaaccgatccacaatacgcgcagaaattggtgggcgttattcagcaaatgaagagcgctgggaatcaggcggtcaaagcctatacccatgatttaagtcaaattttctaacggcaggcagcaaactgacggcgtaaaaccccgaccgccctgtgatttatccccgggcggttttttttagcaggaatatcgccgtaatccatcgggaaaaatgggtattttttgccaaatttactcaagttatccgatctttggccgataaatattacaggctgcgcggggacttgtacccctcagacagtaaccctattcatcaccgcaggtgacacaaactaccgatcgcctgccgtaaaaggatttctttatgtccaacaatctgattaataccgcgatgagtggtctgagtgcggcgcaatacgccctgagcaccgtgggtaataatattaccaacttccaggtcgccgggtataaccgccagaacgctatttttgcgcaagcgggcggcaccttgtctccagcgggtttcctcggtaatggtgttaacgtgaccggcgtaaatcgtgagtacaactcctttattaataatcagttacgctcagcccaaactcaaagcgccggtctgacaacttattacaatcagatctcgcagattgataacctgttggcggataaaaataacagcctgtccgttaccatgcaggattttttcagcaatctaaaaggtctggaaacgcttcctaatgacgacgcgacgcgtaaaaccgtgttgggtaaagccgaaggtttggtaaaccaattcaagaatgcggataaatatctgcaagacatgaataacggtgttaaccagaaaattagcgacagcgttaaccagattaataactattctgagcagatcgccaaacttaacgaccagatcacccgtttacgcggcagcagcggcagcgagccaaatgctttgctcgatcagcgcgatcagttggttagcgagctgaacaccattattcctgtcaccgtaacccagcaagacggcgacgcttataacgtgtccttcgccggtggtttatcgctggtacaggggtcgaattcttataatatgcgtgcaattccttctagcgcagacggtactcgtatgaccatcggttatgaccgcggtctgggcggtgtggctgagctggacgaatcccgcattacatccggttctttgggcggtacgctgaaattccgcagtgaagcactggatagcgctcgcaaccaattagggcagttggcgttggtgatggccgacagctttaaccagcagcacgaaaaaggctttgatatcaacggcgatccaggagagaagttcttcaactttgctcagccaaacagcgtcagcaatgccaaaaacaccggcaccggccatctggatgtgagctacagcaacactagcgaagtgcaggccagtgattacagcatggaattcgacggcaccaactggcaggttacgcgtctatcagataacagtaaaatcgcgcctaaaaccgaagctgacggcagtctgagctttgatggcctgaatgtttctgtcggcgcaggcgtagcggcgaacgataagttcaccatcaaaccggtggctaataccatttctaacctggatgtggcaatcaaggattcctccaaaattgctgctgcgggcgcggatccaaccggtgtagacggtgggaaaggcgataataacaacgccaaggcgttactggatctgcaaaacaaacaattggtcaacggcaaagcgacgttgtccggtgcttacgccggtttagtcagtaacgtgggtaaccaaaccagtacggcgaaagtgaacagtaccgcgcagttcaatatcgtgaagcagcttgatgagcagcagcagtccatttccggggtaaacctggatgaagagtacggcaatcttcagcgtttccagcaatattacctggccaatgcgcaggttatccaagtggcttcgactctgtttaattccttgctggaaattcgttaaaccgaaccctgcggggataaatactcaatcactgttctgcgatacggctcgcagaacagacgctaaaaggaactgacatcgtgcgccttagtaccagcatgctgtatcagcaaaatatgcgcggcatcactgatgcccaatctctgtggttgcagtctggccaacagatttctaccggcaaacgagtgattaacccatcggatgatcccatggcagcctcacaggtgatcatgctgtctcaggctcagtctgagaatgcgcaatttgccttaggccgcagctatgcgcgccagacttcatctttggaaaccaactttttggcgcagtcaaccagcaccgtgcagcaaatgcaagcattggtgatcagtgccagtaaagactccctgagtgatgatgaccgagcttcttacgcgactcagttgcagggcctgaaggatcaattgttaaatcaggctaactccacggatggcaacggcaactacatgtttggcggtttcaagaatgacaaacctcctttcgttgccgatccggtgaccggcgcggtaacctataacggtggtgatgagcctaagactcaacaggttgattctttccgtaacatgaccgtaggccacacggggtccagcgtgtttatgagtctgaccgccaatgcgcgtccggagccaacggatccggctaccggcacgacgccagcgtcagaaagcaatattttcaataccatcgataccgtattgaacgcgctgaaaatgccaatgaatggcgcatcggaagcagataaaaaagctctccgcggatgcgatggataaagggattcgcgggttagacaactcgttgaataatatcctgtccgttcaggccgaaattggtacccaattgcaggaattggacagtctggatagcctgggcgacgaccgtactctgataaacaaacaacagcttagcgatttacaggatgtagattggaacgccgcgatttcatcctacgttatgcaacaagccgcattacaggcttcgtataaagctttcagcgatatgcaaggcatgtccctgttccagcttaaccgttaataccctgcgttcttacccgctgaccagctcggcgggtccccttttaagtgtacttaaaccgggtgcacttttcggtatgtcatcttttcccactaaggtttgggatggcataccacctttttattcgtccccccatctttagcctcgtttcaagttaacttccaaccctaaagcatcgctataacaatccgttatggcagagtgattattgctattgctgcaagtaattagtgacgtgaaatgatggggctcagagaaagagggcgctagcttcaggccatcccgccaacaacaccggccagacgatcgaagaactcaccgaacagatgctcgcagtagggagcaagactcggcattaacaagcccagaaccagcatacctatggttaaagtgagggggaaaccgatcacgaataccgaaagctgcggcgtcatgcggtttaacatccccagtgccatgtttagcgtgagcagaatagtgatcatgggtaacgcgagcataagtccactgataaagatcagagaaccgatctcggttaaggcgcggaacccgccgccgtttaggggcgcaaactgaatgggcagcgtgtggaagctgtcggacaacatagaaatcagccataaatggccgttgagggacaaaaagagcagcattgcgattagattcagcaatcgcgccagcacgggcatattggggccaccggagggatcgaagaaggtagcgaaagacagccccatttgtaacccgatgatttcccccgctaaacgaatggctgcaaaggcgaactgcatggtcaggccaatagcgacgccgatgatcacttgctgaatggcgacccaaatagcgccgacggaaaaaatgggaatatcaatgaccggcagggacggtgcaatcagaaaggtaatcattaccccaaggccgactttgaccttacggttgatcgatttttcattcagaaccggcgcggtgctgatcagcgccaatacacgaaccagcggccaaaaatattggctgactaaatggctaagctggctggtatcaaaagaaagcatgtttagccgatcagcgtaggcaagctggtgaaaagattacgcatgtaatccagaatcaaattcagcatccatggcccggcgataaccaaagtggcgaagactgccagaattttaggaatgaaagacagggtcatttcgttaatctgcgtggcggcctgtagcaggctgaccaacagaccgctgaccaacgccgccagcaatagcggcgcggccagtgccagggcgattttcatcgcttcagtgccaagcgccattaccgattcaggagtcatagcctacctttgtataaaatgagctggatgagataatttcaggctaactgtagaaactttgcgccagtgaacctagcagcaattgccagccgtccaccagaacaaacaacatcagcttaaaggggagcgagatcgtcgccggcggcaccatcatcataccgagggccattaatacgctagcgaccaccaaatcgataatcaggaacggaataaatacggtaaaaccgatctggaaggcggttttcagctcgctggtgacgtaggccggaagcaaaatacgcattggcaccgcttctgggccttcaaacgcaggcagattggctaaacgggcgtacagcgccaaatcggtttcccgggtttgtcgcagcataaattcccgcagcggctgtgagcctttatctatggcgatgtccatggtgatcttatcctggctaaacggcagataagcatcctgataaactttgtcgaacaccggtgacatgataaagaaggtcaaaaacagcgccagacctaacaaaacctgattcggcggtgccgatggcgtgccgagggcgttacgtaacaaacccagcacgataatgattcgggtaaaactggtcatcatcagcaacgccgccggtaagaagctcagcgaagtgatcaggactaaggtttgtaccggtagtgaccagctttgcccgccgttggcgagaggctggctgataataccgggtaattgcgcaaacaccgccggtgagaacaacagggcggtgaaagtgaataggggggtaagcagacggcgcatccgcaccgttaaggcaaaagtggccttgaattcagggcgctgagacgtcatgccgatttttccgggtgtttcaggattttttgcagtagctgacgaaaatcagccggtttagtggtatctggctcgacggtagggtctaccggagggcgttccatcgtgtgcaactgagtgacctgctgtgaagtgacgcccagcactaaccaggtgttatctacttccacaatgactacgcgctcgcgctggccaacctgacagctagcgcgcacattcagcaatttgttattgcgcgcctgcggagcaaagcccagccgttttaccagccaggcaccgcacagaatcagtaaaataacgccgccgagaacgctgccaacctgcgttaataccgcaccagccggaagggcaggtgccgcgggaacggctgtttggctactcactccagggtgagaattggcgaaaccggtgaccggcgtttgtgcttcactcattagcggcttaaacggcgcatacgctcagatggcgtaatgatgtcggtaatacgtacgccgtatttatccgcaaccactaccacttcaccttgcgctatcaggtaaccgttaatcaggatatccagcggctcaccagccagaccatccagagaaaccactgaaccttgcgataggcgcagcaattctttgatggtcattttggtgcggcccagctctacggacagttttaccggaatatcaagaatcagatcgatttcctgcaaattgccaagtgcgtccggtgcctccagcgatttgaatacgccttcagttgttgccgttggtttttctgtcgcttgctgctcgttaaacgcatcagcccacagatcatccacggattcctttccatcgccagacggcagcttagggtcactcattgggctgttcctcatttagagcattcaaaatagggttaatcagatgttcaacacgaagggcgtattgcccgttcagagtaccgtactggctggttagcaccggtacgccatcaacgtgggcgatcagccggtctggcttatctatcggcaatacatcgcccggtttcagttttaaaatctgagacaaacgcagcgagatctcggcaaaattggccaccagctccagctcggagtgttgaacctgttttaccaacgtttcgcgccagtgggtgtcttcctgacgtgagttttccagcggcggattggtcaatagctcgcgcagcggttcgatcatggcgaaaggaatacagatattgaattcgccgcttagcgcgccgatttccacgtggaatggcgtggtgaccacgatgtcgttcggcgaggtagtgatgttggtaaatttcacctgaatctcggaacggacatattccacgtcgatcttgtaaatggcggcccaggcgtcgcggtaggcgtccagcgccaaacgcagcatgcgggtaatcacccgttgttcagtatgggtaaattcgcggccttccactttagtcgggaaacggccatccccgccgaacaggttatcgacggcgataaacaccaaacttggctcaaacacaaatagggcagtgccgcgcagcggtttgagatgtaccaggttcaggttggttggcaccggcaggttacgggcaaattcatggtaaggctggattttaatcgggcctaccgtgatgtccgggctacgacggagcaggttgaacaaccccatgcggaactgacgggcaaaacgctcgttaatgatctccagcgcgtgcagacgctcacgcaccacgcggcgctgggttgtcggatcgtaaggcttaacgtcactgtcactgccgactatggcaaccggctcatcgtttccgctgtcgccgtttaacagtgcgtcaatctctgcttgtgaaagtatgctgtcgcccataatgattatcgcagtatgaatgcggtaaacagcacgtcgctgattacctgattaggttgacctttaaccattggcgggctgaggacggttttgatttgcgccattaaccgctgtttgccttcttcgttcgccaggctttcggcagtctggcgagacagcaacaacagcagacggctgcgaacttccggtaaatagtcgttcagcgcgcgacgggtattctcgtctggcaggcgcagagtcaaaccgatgtacagcacgcgatccaggttgttgtccggcgtgatcagattaacggtaaaggtatcaagcggcataaagaccggagccacagggacaggtttaacgttcgcaggcttgctgttgtgcagtacccaccagctatagccgccgcccgcagcagaagccacggcaatcagtactagcagaatcacccagattgaacttttacgcttggccgggatggtgttatcagacatggggaagacaaattcctgtttcgtgtatctgcataataacgcgggtatgactcgttgacggatgtcgccaccttggcaacttctgacaacctacccgcgttaaacgaataatggtgatgattatcccgcgtatcaccgccggcaataggcagaataggtgggaaaaaacggcctacctcgcccgtttgttcaattttaggcgaaaatatcaacaccgccgttgccggatgctaaagattgcagtgcggctggcgtcaccaacggtgtcagagaatcagccgattcagcgttttcgccgtaagcaggctggccattagccgcatagttttgctgattttgttgatgctgctgttgctgagcctgctgccactgagacgatccttcgctactgacactgctctggcccaattgaatcccactttcagctaaagcatgacgcagccccggcagagcggcttctagcgcggcgcgaacctgaccgtgagctgaggcgaagtgcagctgcgcctgattatcttcgatcttcagactgatttgcagcgcgcccaattcctgcggatgcaaacgcagttcggcattttgctggccgttgcggctaaacattaatacctgctggcctaacgcctgctgccattcctgactgcccaactgagcgctcaaatggccggcaaccggggcggaagcaaggccgccggtaggcgcagccatgattgggctggagaccggcggtaatgaaggggtgatagcgctggttaacaaggctttctcgccgctattgactgcttctgtcggggcgattaacgcactcagcgcagcggttttattggcggcgatggcgctgttgtcctgtgtctgaccggtagggcggttctgacgcagttctaccttttcggttttggtttttacctcggccaataggttattcgcggggttaccaccctcttttttaccgttactcaaagtggtactcaacagcgcgcccagctctttatcctgaccggttaagcccagcagactgcccagcgcttcgcctttacctgcggggctacttttggagccagcattcagattatcctgtgcggtcagccctgatttcaggctgttaccgcttgccagtgtagtcgctacctgatggggcaacatcgccagcaaagtatgtaatgggttcaggtcgggtttatcgcgctgaatttccagtttttgatcgtcttctggcgttgttttcttgccatgagactcgcctgtctgacctgcggccgttaatcctgccggcagggtcgcggtgatatcacccaatgcggccagcaactggttaagcttgctactgccttggctggttttatccccttcgacatcggcaatgttaccggtgacggcggctaaagaagatttcagcgctttggcatcggcggcatccagcttctgagccaattggctcaattggccgcctagcagctcggcaaaatccgccggtaaacccgcatcgctgaataacgcagcgatagaagaagacgctgcaccctcagtttcggttggtgtcgcaacaccgggcagtacagacagattcatgaattcaggctcctttgtgagctgcgctgggcaaactcatccatcaatttttgatccatacggttttcatggtgacgctgggtggtttccgcccgttcctgcaaggtttcgaacgcgttgaggcgttgctgtttctcttgccagtgcttgacggctaaatcgacgcgctgattccattgcaatagctgctgccggtgctgatcgattgccaattccaacgtctgaataaactgctgataattctgccaggttgaggaggccatcccgtcggataaggtatcgttcagcttgacccgatattcatcctgatagttgagcaacatattcaattgctgctcggcttgcaggtacgattgacgcacctgtcccaactgtgtactggccttttcgacggccttctgcgccaagtcgcgcagggtaacgagaggtgattgacttttcatcgtattcctcatctattacggaatgaagattggcgtcagtgagctgacggccaatcagccgggaaacagcgccttcagatgctgacaggcatcctcatagctacttcgctcaaacattccttgctgcaagaaggtttccatctgggggtaaagcaagattgcgcggtcgagcagcggatcgctccctgccgcgtaggcaccgacgctgaccaaatcgcggttgcgttggtagctcgccagtaactgtttgaactgacgaactttgctgtagtgatcctcatcaatcagcgccgtcatggctcggctgatggaggcttcgatatcaatagccggataatggccggattcggccaaacggcgggacagcaccacgtggccatccaaaatggcgcgggcggagtcggcaatcggatcttgctgatcgtcgccctcggtcaatacggtatagaaagcggtgatagaaccgccgccgctgacgccgttaccggctctttcgaccaacgccggtagcttggcgaagacagaaggcgggtagcctttggtggcaggcggctcgccaatggccagcgcgatttcacgctgtgccatggcataacgcgtcagggagtccataatcagcagcacatgctgaccgcgatcgcggaagtcttcggcgatacgagtcgcgtaagcggcaccctgcatacgtaataaaggggaaacgtcggccggtgcggcaatgactaccgaacgtgcgcgaccttctgccccaagaatattttcaataaagtcttttacttcacgaccacgttcaccgattagcccgaccacaatgacgtccgcctgggtatagcgtgccatcatgccaagcaacacgcttttaccgacgccggaaccggcaaacagacccatacgctgaccgcgaccaacggtgagcagggcgttgatagtgcgcacgcccacgtccagaacctgttcgatagcggtacgctgcaacgggttaaccggcggcgtaatcaatggtgcgcgatagccggtttctggcgcgggtaaaccgtccagcggcttggcgctgccatccagtacgcgtccgagcaattcagggccgagaggcagttgtttactggcggaagcgccattggcggtaatgcgtgcatagacgcgcgcgccgggcacaatgccttccacttcttccaacggcatcaaaaacaggcgctggccgttaaaaccaaccacttcgctttctacttcctgcacttcgccgccgtcgtgtcgttcaatcaggcaggttgcgccaaggggcaattgcaagccagtggcttctaaaaccagaccggtggcgcgggtcagacgaccatagcgccgaaccgaaggcgactgaacgattcgctgttccagtttatccagtgtagtcagccagcggccaagacgggcggtcattacaaatctcccggtgcggccaggcggcacagctcatgccaacgggttgcgacgctggcatccagatcgccttcttccgcgctgactttacaaccaccggcgtgaatctggctgtcggccagcaaacgccaaccgtgcaggctcagggtggcgcctaagcgctgctccaccatcgccaaatcgtccggatttacgcgcaactgcggtttgccgttaaacattggctcttgctgaatcagctgttggatttgacccagcagtgcggtgccgtcacaaatagccggttgccccaaaatctgtttcgccgccgtcagcgccaattgcatcaaacgagaggcgatgacgctgtcgagggaatcgagcgtattttggaaatcagcgaccagcgcctgccagtgagcggtcatcggctcttgcagtttctgcgcttccagcaaaccttgttcacgcccttccagcagcccggtttgatagccctgatccagaccttcctgcaaacctttggcgaaaccttgctgccgaccctgttgctccgcctgctgttgcaaactttgcagcacctgctgttggtcgggttcctgtggttcgcctgcttcgtcggtaaactcggtcatcgcgacttccggctgggtagccggagcgtcatcaaactgactggcgaaatccttgggagcccaaggctgccagggcagggcattaagctgatcagacatagatgtcctcgccgccgccaattacgatctcgccgctttccgccaaacgacggacgataagcaggatcgctttctgttcgctttccaccagtgacatacgcactggcccacgcgtggccagatcgtcgcgcagaatctcggcagcacgcagagacatgttgctgaggaaacgttcgcgcagagcctgatccgaccctttcaatgccaccaatagggactcggagtcgatctcttgcagcaaacgctgaatgctgcggtcgtcgacgccaaccagattttcgaacaggaacatctcgtcgataatcttttgtgccagttcgccatcgtattcgcgcatggcgtccataaccgcttcttcctgctgggttttcatcaggttgataatctcggcagcggtgcggataccgcccattttgctgcgtttgagattctggccgtccaacaggttgttcagcacttcagtcaattccgccagcgccgccggttgaaccccaccgaaggtggcgatacgcagcatgacatcgttgcgcagacgttcgtcgaacagcgccagaatatcggcagcctgaccgcgtttcaggtgaaccaaaatggtggcgatgatctgcgggtgctcgtcccgaatcagatccgcagccatctgcggttccataaagttgagggtttccatgccgctggtggtttcgcgagactccagaatatcttccagcaggctggaggcacgttcttcccccaaggctttcaccagcacgccgcgcaggtattcgctggcgttgacgctcagcgctgcatattgctcggcgtcgtcttcaaactcgactaacacgtcaattaattgctgatgagaaacctgacgcatactcgccatggtggtactcagttgctgcacctcccgcgacgagaggtgtttgaaaacttctgcggcgtggtcttcgcccaacgtcatcagcatgatggcgctcttttcagttccggtcaggctcattggtctgtactcatccattgacgaattaccagcgcgacaacgcgtggatctttatctgcaagttcgcggatacgctgggcctgaacttcagcgcttacacgctgttgtgatttcttacgcagggccagctcttctttgctctgtttcactgtttcagcggtttgtgccgtctgcgctgcgttattagccgcagtaatcgccggattcacttcctgtttcttagcgataaacggacgtaccagtttgcgccacagaatccaggcaaccagcagaatcaacagataacgaccggcactcatcaactgctcgaagaaggattgttgtttccagaacggcagggcgctgctggtttcttcggttgcggtaaacggcgtattgaccacgtttagcgtatcgccacgcgcggtagagaagcccatggcttcacgggttagcgcctcaatttgcgccaactgatctttgctcagcgcgatcggcttgccggttttcttgtcgatatccagatagttaaccaccacggcgacggacaggcgttgcaccatgccagcctgttgctgggtgtgacgaatagtccggtcaacttcatagttagtggtttcatcccgacgactgctgcccggaacgctattgcggttgccagtgccggcggtgttgttgcggttagccgcagtggctgcggcggtattcgctgctgcaccggtagcccccggcgctgcgccaactggcggagtttcaatcggagcaaccggcgtggccgaaggctgattggataaagcgcccggaacgccgccgattggcgtgccgccaacctgttcgctttggcttagctgctgtgaccgtaccgcgccctgttcagggcgttggtttggtttgtattcttcgtccgtctgctcgcgggtcgcaaaatcaacctgcgcggtgacctgagcgtggacatttccgttaccgaccatcggagccaaaatagactcaatgcggcgttggaagcgggcttccacctcattggtaaatttcaactgagcggcattcaaatcgcgaccggcgctatctgattgcgtcaacaggcggcccgtttggtcaacgacggtgacgttacccggaggtagaccggccacgctgctggaaaccatataaacaatggcgttaatctggccatcatccaatgcgcgcccaggctgtaaagccagtgtgacggaagccgaaggggatttttgttcacgaacaaacagcgaaggcttcggcaatgccaaatgaacgcgtacgttcatgaccgggccgagggtttcgatggtgcgggataattctccctccaacgcccgttggtagttgatttgttcactgaactggctgatgccgaatttttcctgatccagcagttcaaagccaacggcaccgcctttcggcagcccttgctgcgccaggcgcagacgggtttcatgcaccttgtctgccggaatcagcagcgcaccgccgttttcggcaaagcgataaggaatattgagctgagtcagttgagtgacaatagcgccgccatcgcgatcgctcaaattgctgtaaaggacgcgataatccgggcttttcgcccataacattaaggcgacaacgatcgacactgcggcagcagcggcgataagtaacggaatttttggattggcgcgcaggcgattcaacagcccgctaaagccattctcacggttctctacgccagttatcgaggcattcatacgcattccttgccaggctggacaacgttgacgttagtatttgtgtaagtagtgtatcgaaacaaaacagactccctggtacgtaagcgacaaagcagcaatcgccggtctccccttttatgggcatgccattatttgtcggattaagggaatttgatgagtcaataaggcgatgtttttgtatctaattagccggtttagctaaaaaatgatgtgttagggtgtcagcctgaaaataccaatctgtgccgggcttaaagaatatccgtcctgagcacgcgctttttactgaggttttatgtccattcaaggtattgaaggtgttttgcaacaaatgcaggtcagcgcattacaggcggcaggaacggccaaagtgctgccggctgagccgggttttgccagcgaactgaaggccgcactgggtaaaatcagtgaagtgcagcaaacggctcgtactcaggcgcagaatttcgaactaggcaaaccgggcattggtttaaacgatgtgatggtcgatatgcaaaaatcctcaatctccatgcaaatgggaattcaggtacgtaataagctggtttcggcctatcaggaagtgatgaatatgggcgtttgatggcaacgcagctattcagatgatgcttgcccataaaataaggttgagagcagaaaagttattttcatggatataatggactaagataattaactaacaaggatgaatgtatgagtaagaatcaaagaattgctatgtttgcggccataggtggcgttggttatctggtatggtacgtaattaaacatactacgggattataattttctattattattggctccccacttgtcatcaatgctactggtagctccgaacgatagggctgcccgagttgatcattatttttctatttatgttatgacgcttagcaaaacgctgatttcctagcgccactgaaatgcttttccctgaatgactccacattgtcataggataatgtggagtcattcaggggggctattcgacgtaatcctgctgtcagcttccggacaattcatataaccctgttctactgcctgattataacggtttaaggcgacgaagaacggtgagcgatggccatctttccgttaagtatcatgaaggcaatcccctcttatcttactgattatcatcatgatatacggtgtcccgccggtgtttatccccgattgtttagtggcttaggtagtgaaaatcgtcgcctgaacaacgggcagagaatcatattaaaagaagcctaggcagcaggcgcttaatatcggaatagccagtaatgatatgtggcgtatgatattaaatatccttaatttaaatttcgattaatctttcgtttaactgaatttattaatcaagcctcaattaatcaacggagtttccgcagtaaggactcaatcagtcagcaggaaagccttatattataaagcgtcgctattatatgtgttggcgtctattatttatatgtttgtttatttcaattaatgttaaataagaatggccaattaacatgaaaggaacagctatagtcgaatgctatattcgacatgatttaattgattttttgtacatcctttaattacattcattttagtgataatgggtggagtctagggatattgtcatgccacagttaaaactcactatttgttatcaacacaattgttgtattaatcaatgctgtgtttacatacaaatcttggaataaaaaggatgaatccatgagtatgaaattaagcagtaaaatctttgcttttgctccggtattgttggtcgcagcctgtaccacgacgccattacccccagtaccgcaggctttgctgggcgtagatcgcggcatggcaggaatagataactgtgcggtagggtgtccaacgggaagccagagtgatgaaaccctggttcgagatagttatacgttgaacaataatccaagtactaagtttgctaactgggttgcctacaagattacaaaatctactcaggccagcagccgaccgcgtaactggaaaaccgatcctgatttacctgccagcgatactctaagccctgatgattataagaatgcgaatcaagtgctgaaaatcgatcggggacatcaggctccactagccagtttggccgctgcccctgactggcagagtcttaattatttgtccaatattacaccgcaaaaagccgcgttaaatcagggggcatgggcgaggctggaagatcaggaacgtaaactggcgaacagggcagacattagcgcggtttacaccgtcaccggcccgctgtatgaacgttctatggaaaaactgcctaatgtgaaaaaaccgcaccaaattccaagcggttactggaaaatcatttttatcaataacagcccggcagtcaatcattacgccacttttatcctggatcaggatacgcccgccacggccaatttctgtgattttcaagccacggtcagtgacgttgaacgtcgcgccggtttaactttgtggtcgaacttaccgactgaaattcaggcgggattgaaaaaaacgcccggcgtattatcagagcaaatgggatgctcgccagccaaagcataaaatgtagtggggcagcctaaaaaagaaataaacccgggagatatattccgggttttatctgtcgtagagtcatcggcggcttaaccctatattttcactcagataaaacctatactgaagccactttatcactgatggttagtctattgatgagattatttcacaggattaaagggcgtatatcccccactttttgtctggccgtcatggtcgctattaacggttacctgatattagggccggtactttcccgtaccttaagttatgttccccaaaccctgggtagcataggtacatggaaagaaacgttgtccatgttagggctattggaaattccccgttttgtcattggtcttagccttattctgatggcgataggtttagctcttaaagcgcgtactgcttgggttttcactctgtttttgctgctggcaatgacattgctgaattttatgaacggtaatagtgatgtgcatattaccggtttgtccgtcgctattattcttggcttactgatttgttggcggcagttcgatcatcaaagcctggccagtagcagcttatttgctatcgtcagtatttcttcattattgttgtacgcggtgattggcacgctttatttaggcgctgaattctctcctgcggtggaggatctaccgacggcgttctatttcgcgatagtggcgatgtcaacggtaggatttggcgatattgttccggcgaccacgcatgctcgcatgtttacgctttcgattattattatgggtattacggtatttgcggcatcgattacagccattgtcgggccgatgattagccataatatccagcgaatcgttaaaggcaggatctctcacgtgatacgtaaaaatcattttattattgtcggtacaaccccattggcactgaatgtgtatcaaggtctgcgggatcgtggcgaactggttaccctggtggtggctaccggaacaacggcggagttaccgaaaggcgcagacgtggtgactggcgatccgtcatccgtagcgactttgaaagtcgcaggtgcagataaggcgaaatatattattaccctatgtaatagcgatgccgagaatgtctttacccttttggctgcgaaagaagtggcagggccagagactaaaacaatttcgttagtcaatgaaagccagaatcagccgaaaattaagcgagttaatcccgatatggttttttctctacagctattggggagtgaattgttagtcagaacactcagtggtgaaactatcaataatgagctgatcactgaaatgttctttggcagttgcgtgaaggcaaattgatttttcagacagcactgacgatattccgttaagtgccaatagcctttatcccacgccggtaacgcccattccggcgtggagctattatcagcaacgatatctttaatcaccataatctgtatccgtagcgctcacggtcatatctcttggtattacggggtgccaaccttacgtagcagagtggtaatatcgatgagatcgacttgttctggttgaatataggttttggcatagtcttgccagattcccgattcgataaacaagataaacaattgtcgatcaagatgattgtcgttaaccatattcgccatgatattcaatgactcggacagttttttacctgctttataagggcgatctgctgcagtcagcgcttcaaatacgtcagcaatggccatcatacgcatggtcagactcatctgctgggcattcagttggttaggataacctttcccatccattctttcgtgatgtccaccggcaatggttggtacgtttgacatggtacgagggaaggggagctttttcagcatgatgatcgtctgcatgatgtgttcattgattttataacgatcttcttccgtcagtgtccctcgtctaatactgaggttatacatttcaccatggttatacagatgagtgggtggttgcaatttgaaatcataatattccggatgtttgattttatcgtcccgataaataatatgttcctctttgtcggccaaaagtggctcttgagccggtaagggtttttgcggtgtgcggtttttcctagacatctcttcattgcctaggccggttctatcatcgagcgtccgtgtccagcggtgttgagcaatatcatgaatgcgcttaatggcttcatcggataatccctcctgaccaatattggtctgggcgatgaaatagtagtcctcatccagtttccgtaattcctgatttatttgcgagcaatctggctcttgcccagattgggctaggcattggcgtaaaaaatcgatttctttctctcgttttaatacttcgaaacgcatacgaatttcatgaatccggttataaatggtttccagcttggtggctttatcaacaataaattcaggagtggtaattttcccgcagtcatgtaaccagcacgcagtacgcagttcttcccattcgtcattacttaaactgaaatcggcaaaggggccttctttcatttcaacggcaaccttcgccagcatttcggtaataaccggaacccgttgacaatggccgccggtataagcgcttttggcatcaatagcgcctgcaatcagcttgataaaggaatccagcaggtttttttgttcctgcagcaaatgctgagcctcgacagaaatggacaggctaccgactagcgcattaaccagttgtatccgtgaatacttcctttcgtgattgatcgactcatcatcaaagagtaataagaatccgagtaaatgatcgtcatgtcctcgtatcggggcaataataaaacgcagaggaagctggtcggccaatacctcatacagggcaggccataaattatctttattcactattcccgatgaggttctgccgtacatcacaggattaaacggagtgaaatagctatcgctaatagccagtttaggcatgttgctaacgtcaatggactggtttttccattgaaaggcgatagggaggaatgcggggtttttggcatcattcaggaaaataacaccgccggacatactcgcaatttgcgtggtttccaataataaaccttccatttgtgccgcaaaattgtggccagcggcgagtatattccccatcgaaataaattgattgagcgtcaatttcatcttcttcattgatgcgtgtaattcgtcaatttcctgaataactgacggttcactttcccgttcatcaaaatgtaaatggctaatggcatcggcatcctgacgtagccgtattaaggggtgagatattctcagagaaaagaaccaaatgatgggtaaggttaataacaggagcgcgcaggcaatgagagtcgagttattacgaatctggttagcattagcggtaagatacgacgatggtgtggcaataattaactgatatttattctcatttatcggaatgatgctgccataccattcttgctgttcactggtgaatatatggctttggctggttgcccccgtagatgatgttttgaggcctaacaatgacactaatactgggctaatactttgactctctcctcttgaatttaaactcgcgatagcatcattctttgcgtcaataatgacggcctggctgccaataggtaaattttgctgttgtaagaactcactcagtgaagcgagagatatatccattcccactactgagcttctatttaacgctcttttactaaaggttatccccggttctttagtcgcatgatagatataaactggcgaaatagtgacaccgttattctgcaatgccgaggtaaaccaggtgcgtaatcgcggatcgaaaggatccttttctacccgccggttagcaattatttgttgcttcgcatcaaggaaaatatagtcttttattggtgattcaccggctatttggctgcgctgtattatccattcggtattggggggagcacctaatatagggcgattagtattactggctcgccttagcagaaagaaatcaccgttgtcataaccactataaatagcactggcatacttatttgaatttaaaatctcgctgagccgttcaatcgagaccatttgtcgttcaaagacggtgttgtcggttatgggtaagctagctaagatattgactgacatagacatagagtgagtaatgctatccagttctgtggcaatggctttccctgttttttgatattgttccagagtactgctttcggtcagtttggtgagctggtggtgattaaacaaaataatgacggtgccaatgatcagaattagcagcgtaaataaggatgctatctggatatgaagagggtaacggtttttaagactcaaagtcattcgtagcataggtacctgcgtgcagattacctccgattacttttataatagttgttattgcaaaaactgtattcaagagacataagtatcatcattaatttgttgatattaaactcttttatttattttttcgaagataaaaaatgcgggttggtaatacgctaacgcgtctagattcaactaagaataacattaaacattttaaaatagcttacccgccgccttgctctataacaggaataggctaggaataagacggtttgaaatcactattgtattgcgactctgtttccaacgagcctgacgccagtcggtggtggccgcgtatggctgttggcgcgaagccaaaacgtttacggaatcgctctgcaaagcgtgatgaactttcatagccgacgcggttggcaattaatgatatcggccagtcggtcgcttgtaacagcgttaatgcgctagtcatgcggacatcgatcattaaattgcgtaatacaacgttctcggcagaaagtttccgtcgtaataccacttcgctcatagacattcgctctgcgacctcggcaaccgtccatattttatgagggtcggttgccagacaacagcgtactttttctgtcagcgtttctgcatcttttattaagaacttaacgccacgctgggtcagccaaagcaatagctccaccatgcgatggcgaatgatgggcttcggaatatcattgttatcagctaataccttaaaagtattggtgaaagcattgataaactccggcgcaggattacgcaccggcatgacatctggtattacggacaggtcatgggctttgggattatgggcaaatgtattgattaactgaggttcaatactcagcgtatggctgaagaaaaccccatcagcagataacccgttgactatatctatagtttgaccaccgctgatagcggccatctcgccgggcaggattatacattcctggttttcccagcgaataaccttatggccgtggttaaccataatcagcagtgggtgttgtatataaatcgaggtgagtgcaagttcagtatgttgaataacatgccttgaactgccaatccccgaacatagattaattgtacgttccatcgatattcatttcacagtctttacctgagaatatctttacgcgttgcgcaccagacaagcaacttattttaatacaaatttagtgcgtagtgctatttcgtcgagaaaaaaaactggtttgttggcgcacacaaatagccatgtaaacagggcaaacacaccgataaaatcacgctcatccggagtaataaaaaaacattacttgcaatgttaatgatttcattcgaatgtaaaatgagaatatctatcttgttgttatgttgataaaaccatcgctattgtgtttcacctaataacaccgcatggtctgggaactgaccataagtattatttaccacttgttgtcgggttgattgtccgaccagttcgcttaattcattaaggcgtagctgtaataagcgcttaatttcagtttcattatctaaaatgttttttaatttctttcttaatatctcttgcagtgaaagagacgaacaagaagaaatggtcacgttggcggtactctcaacagctttcagataagtcatttccagatcaaccagcgcatcccaatttccctcaattgcaaaggcaagcatttgttcactgagggtcaggatatgttgatattcggatagaaggtgctggtgacgttccattaaatggggtcctaattgggttgataattggggccgatctgccgccaggcatcagcaatattttcaagcaaggcttcgacttcgacaatagcctgctcgtcattatgcaaattggcatgcagtaagcgacgtgacatatagtcatacaacgctgacagattttctgccagctcgccgcctttttccatatcaagcccagtacgcaggccgttatcaataatattgatagctttggaaatagctaatccctttgcggcaatctccccctgattcatcaaaatacgtgcgcgaaccagggcgctttgcgccccgtcgaacagcatcacgatcaactggtgggggctggcgctcatgactccgctttccaatcctacctgtgcgtaagcctggctccctgaccggttgtacatgttttctatcctttgttatttaaattgtgccaacagcatgttgcctgtgtttttgaacgaggtaaccaatttatctagctgaccgaactggatcttgtagcgttcaatcgtggcattgatattggctgttgttgaaataacctgtttatccagatttttcaatgaacggttgatcccgtcggttgcacttttcagcgtacctttcgaggtatcaagggcaccattcagcagtttatccatttgggtagcaaacccggtagtttcaccgtccccggcaaagaactggttaacgctgcctggtttttctttcagcgctttatccagtttctcgttgtcgattttcagcttcccattaagatcctgagtgatccccaggctagctaaggttttgacatcgccgccttgagcagaagataactgggctttcagttgggtctgaatattacgcagcgtattgtcaccgaccaattcaccgttgccggacgactgctcttgacccgcttcaaccgcggtatatttggtcagtgagctaaaagtggtttgcagtgagttataggcatcaacaaaagcctggatcgcatctttggtcgctttgggatcgcgtaccacactcagaacttctggggtgtcaggtttggtgacgctcttcaacgtaagcgtcacaccagcaggtgcatcggtaattacgttactttgacgagtaatatcaatgccgttgactttcaatttggcatccgctgctggaacggtttgcttcatgccatcggtgctggtgcttcccggcgtatagttcaggatcttgcctaaatcatcatcgccagtcacgctaacggtcatttccgacttggtgccggtttcttttgaagtcagcgaaaggtaataggtatcgtcatcacccttcattatactggcggtaacattgccttcctgcttgttgatagcatcgcggatatcattcagggaggttttatcttttgccaatgtaacttccatcggcttttcttggccaggctgagtaatagtaatggttcttgtttcattactattgcccaaattatcttttgtgttaggcatcttgccggatagcaaggattgcgccttagccaattgagaaatttcaatattatagctaccggcgctggcagcactgtcggttgttgcactaaatgcttcatttttactgctgaccgacgtgccgtttattgtgtctgcttttttcagggccgccgcagcagtttccacttttgccagtgcgttttgcagcacgccaaatgcagatagtttccctttaaagctggtttgttgctgggtcagaggggtaagacgcttttgttctgctgcagacaaaccgtctaacagttcacttaaattcattcctgaaccgctacctaatgagctgatacttgccatgtctaatccttaatattcaagtgtcgtgatagcgttatcggccaggaggaaaaaaagtttacacataaaatacaaatagtgatggatggaatagcggggcattaagtacagctatttgcgctattgaactgaatgacgggtatatcgtgtgcatatttatgcatcaaggcagaatgatttcaattgcggattaaagttctcggcgcaggtgccgatagccttttgtgatggcgacgataactcagtccaatcgccaataatactcattagctacattgaaggaatatcactatggcggtaattaatacaaatagcctgtctctgatgacacagaacaacctgaacaaatcccagtcttctttgggcaccgccattgagcgtctgtcttccggcctgcgtatcaacagcgcgaaggatgatgcagcgggtcaggcgattgccaaccgtttcacttctaacattaacggtttgactcaggctgcgcgtaacgcgaacgacggtatttctctgtctcagaccgcagaaggcgcgttgggcgagatcaacaacaacctgcagcgcgtacgtgatctgaccgttcaggcacaaagcagctctaactctgcatccgatatcgattccatccagtctgaagttaaccagcgtatggaagaaatcaaccgtgtgaccaagcaaaccgatttcaacggtatcaaagtcctggacaaccgtactgcgaccgattccaactacgatttccaagtgggttctaaagacggcgagaaaatcagcatcgctatcggttcaagcgcgggctggaacctggcagcggcgggcgccggcggcgtttctggcgatactgtcaacacttaccaattcaaaacgactacagcgctgggtactgcccaaactgatgtaacgacgaaaaaaaccgactttgataccaaaacggctgacgctgcggcgaaaaacagcgcttatctggctgcgaaagcaatctctgatgcatctggcgtagcgggtgatgttgctgcaaccgcaacagctaaaaccgcatttgataccgccactaccgctgtcggtactgccaatactgcattgaccgcctctaacgcggccttcaaaacggccttggatacatcaacggccgctggtgaagcggttaatggcaatgcacgtaccgttgcagctaaaggttttgatgtactgaaaggtaatgtggattcagctggtctggctgtcggtacgacgccattggctgatatcgataaagccctgaaagcggtcgatactcagcgcagcgtgctgggtgcgtctcagaaccgttttgagtcaaccatcaccaacctgaacaacactgtaaacaacctgacttccgcacgtagccgtattcaggatgccgattactctaccgaagtgtccaacatgagccgtgcgcagatcctgcagcaggcagggacttccgtattggcacaggctaaccaggttccacaaactgtcttgtctctgctgcgttaattccccgtcgagcaggatatcgagcctccgcattgcgggggcttttttgtgtttgttatttattggttttttaataaaaacacgcgatttaattaaagctatgaatgcatgtgccgataaataaagggacggtgattgaagccgtaggcaagaagcctaaacattagccgaaacatatttaaggaataataccatggcggtaattaacactaacagcctgtctctgatgacacagaacaacctgaataaatcccagtcttctttaggcaccgccattgagcgtctgtcttctggtctgcgtattaacagtgccaaggatgatgctgcgggtcaggcgatcgccaaccgtttcacttcaaacatcaacggtctgactcaggctgcgcgtaacgcgaacgacggtatttctctgtctcagaccgcagaaggcgcgttgggtgagatcaacaacaacctgcagcgcgtacgtgatctgaccgttcaggcacaaagcagctctaactctgcatccgatatcgattccatccagtctgaagttaaccagcgtatggaagaaatcaaccgtgtgaccaagcaaaccgatttcaacggtatcaaagtcctggacaaccgtactgcgaccgattccaactacgatttccaagtgggttctaaagacggcgagaaaatcagcatcgctatcggttcaagcgcgggctggaacctggcagcggcgggcgccggcggcatttctagcgatactgtcaatacttacgcatttactaagaaagctgcggttgatacagcacaaactgattacgacgcgaagaaaaaaatctctgatgccgatgccactaaactgcctgacaccgctacagctaaagcgactcttgatgccaaaatgaaagaagcgactgacgcaggcgaagcggttaacggtaacgtgcgtaccgttgctgccaaaggcttcgacgtactgaaaggcaccgtgaccggtggcgccgccggtaccgcagatgccggtggtcctttggctgctatcgataaagccctgaaagcggttgatactcagcgcagtactttgggtgcatctcagaaccgttttgagtcaaccatcaccaacctgaacaacaccgtaaacaacctgacttccgcgcgtagccgtattcaggatgccgattactctaccgaagtgtccaacatgagccgtgcgcagatcctgcagcaggcggggacttccgtattggcacaggctaaccaggttccgcagaccgtattgtctctgctgcgttaatttggtcagggttaatcatacaaaggcggctcttagccgccttttgtcatagggtagcatccccagaagggtattagcctatgatacatgcaagcattccagcaacgggaaggggtattaagtgaaagaacttcaggtcattcagccagattatgtggctaactttagctgtgtaggctccgcctgccgcgaccattgctgtaaacgctggagtattaccctcgataaagagacttatcgaaaatatgcgaaaagccagaatgcggatatcagacgtatcgctgtaaccaatattattgttagtaagaaaagtcaggcaaactgggcttcaataaaattgaatgaagaacaaaactgcccttatttagatgaagaacgtctgtgtaatgtgcataaacgtctgggagggagggcattaagcgttacttgtgccacctatccgcgtatggagcacatatataagaagcaaaaattaaatacgttaaccatttcctgtccggaagcagcgcgccaggtattgctgaatcctaatgcattaaatatgcaagcgacgactattactcaaacgggaaattttaaagcttctgatctgaatatggaaaatcagttggttaatctgttctgcgctaatttaattatgccggagcaaagccgtattgaagaaaatatttacgccatcacatcattcttgctgtattaccaaaaattaagtggtgatgtagaaagcaagttacccgcaatggaagctgcctttggtgatttggtgaataaattacagaatggagatattgcaggatatcttagtaacattccatttaatcagggacttcagtggcagttattaatgcggttgcagaagtttactactgacgcacctcacgcgcgcggccgcgaaacgttatttgcttatttgggacatttaatcaaccatttggtgatcgattttgataatgagcagttggaagaacggatgaaacagttgggtaacatatggaatgagcaggcgatgcctttcctaaaacagcgtccttatctgctgcgtaactatttcctataccgtttacaccacgaccagtttgcaatgaaaggcgatcaacctctgctaaaaagcctgtatctcctggtggtcgattatttctttatcaagtcgttgatcagcgctcatttgattaaaattggcgatctgaccgaagaacatgtcatcgatattttctactcctatcacactttccgccagcatagcgccaaggccaccgccgattttatccatgaaatcgaccaagtcaaagtgaacgacgatttatctcttttgcaactgctggtgtagtcaaacgtgctgtggcgcaggtttaaattggcctgtgccaactattttatgcagaaatgttttgtcactcccgaactaaaaaagcgcataaggcaaatagccgcccttttctatgtctattccggcgattgtctgcgtgacctgacaggataatggtacgactctcttacccgtaggtgcctgtcatagtgagcgatctatataccgccgaaggcgtgatggataaaaattccctctggcaacgctacgttcctctggttcgccacgaggcactgcgtttgcaggttcgcctgcctgccagtgtagaactggatgacctgctgcaagctggtggcattgggctgcttaacgccgtcgaacgctacgatgcgctacagggaaccgcctttaccacctatgccgtgcaacgtattcgcggtgcaatgctggatgagctgcgtagccgcgattgggcaccgcgcagcgtacgccgcaatgcgcgcgaagtggcacaggctatgcgtcaggttgaacaaaaagtcgggcgaccggcgacggaacaagaggttgcccagattctggatatcaatctggatgaataccgccaaatcttattggataccaataatagccagctgttctcctacgatgagtggcgggaagagcatggcgaaagcgttgaacccgtattggaagggcatgatgatgccaatccgttgcagcacctgttggaagggaatctccgtcagcgcgtcattgaagcgatcgaggcattgcctgagcgcgagaaaatggtgctgacgctgtattaccaggaagagctgaacctgaaggaaatcggcgcagtgctagaggtgggggaatcccgcgtcagccagcttcatagccaggcgattaaacgcttacgtgcccgcctgaataacgactcttaattcacattcgctcaattttattttttgctttagcctaatttatgcaggtcttcttatgtctggacttaccttaaagaaaaggccgctgagccgctatctaaaagattataaacacacccaaacccactgctcgcactgtaataaacaattggaacgtatggcgttggttttccgcgggcaaattattaataaagaagccattgccggaatggatcaaccgattgacgatcaggtctgggttaatttacaaaatgagctgacggcgctgtgccgtttttgcagtgaaatatattgtaatagctcgccgggctattttgacattatggcattcaaacaatatttatttgaacaaactgagatgagtcacagtaccgttagggaatatgtggtgcgtctgcgtcgtttagatgaaatgctggtagccagtaattatccggcagagaaatttgccagtgagaccatgcatcagcgaattatcgatgatctgccaaatgcggcacataataattatcgcattgcattgcgaaaatacgatcaatatttggcctggcaaaaaaattactaaattttattcagctattgattgacgcccgacggtggaatattgcctcgtcgggcgttttgcatttatatactctaataatcgatttagccttcactaaaagtcagtgattaatcatctgacatctgataaatctatagaatcgttctatttcattccttttggaggatctgtgactcttcaacaaaaactggcgcaatttccgcgtctggatctggttgggcataccacgccattagaaaaactttcccgcttgtctgattatttgggtcgtgaaatttacatcaaacgagacgatgtcacgccggttgctctgggggggaataaactgcgcaaactggagtttttggctgcagaagccttacagcagggcgcggatacgctggtcacagcgggggccattcaatctaaccacgttcggcaaactgccgccgttgcagccaagctaggcttacattgcgtggcactgctggaaaatccgatgggaacgcaagcagaaaactatctgagcaatggtaaccgcctactattggacctatttaatgcggaagtggtgatgtgtgacgctttggtcgaccccaatgcgcagttggctgagctggcgactcgattggaggcgcagggatttcgtccttatgtggtgccggtgggtggctctaatgccttgggagccttgggttacattcagtgctcgctggagatagccgcgcagtcgcagggcaaagttaatttcagttcagtcgtagtggcatccggtagtgcaggaactcatgccggtctggcggtgggtttacaacagttattgccggaagtggagttgattggtgtgaccgtttcacgcaaagccgaagagcagcggccaaaagtggcgcaaattcagcgagacctggctctttccctcggtatttctagtgttgcggatatcaatctgtgggatgaatactttggcccgcagtacggtatccctaatgatgaaggcacggcggctgtgcagttattggcgcagcaggaaggggtgttactggacccggtttataccggtaaagccatggctgggctgatcgacgggctggcacaacagcgcttttgtgataacgggccaatattatttatccataccggtggcgcgccggcgttgtttgcctatcatcctcatatatgaggatcgatattatttattccattttcaactatagttatcaggttatattcctttatttgattcctaagactgataacgtagcgatatcaaaacgataaacatgacaatcggggtatctatgggcttttcaattgtacgtcgtcgagtggttctgggcatgatggcggtggcactggcaacgggcttgaacgtcaaatcctatgcggcaggcgatctgttggatcaggttaagcaacgtggaactctcattgtcgggctggaaggaacttatccgccgtttagcttccagggtgaagacggcaagctgaccggtttcgaagtggatttcgctaatgcattggcggaacacatgggggtgaaggccaaaatacagcctaccaaatgggacggtatgcttgcatcgctggaatctaaacggattgatgtcgctatcaaccaggtaactatttccgaagatcgtaagaaaaaatacgatttctcaacgccttatacaatttccggtattcaggttctggttaaaaagggcaacgaaggcaaattcaacaagccggaagatttgcagggtaagaaggtcggtgtcggtttgggcagtaactatgaacaatggttgcgagccaatctgaaaggcgtcgatattcgtacttatgatgatgacccaactaaatatcaggatctgcgtattggtcgtaccgatgccattctggttgaccgtttagccgcgctggatctggtgaagaaaaccggtgataccttggttgttgcgggtccggcttttgctcgtcaggagtctggcgtagcgctgcggaaaaataatccggagctattggcggcgatcaatcaagcaattgctgaaatgcaaaaagatggcactttggcgaaaatttcagagaaatattttggtgcggacgtaactaaataatgcaagaaagtattcaactggtgctggattcagcaccatttttactgaaaggtgcctggttaaccctccagcttagtctggggggaatgtttctgggattagcgctgggctttatgctggctatgatgcgtttgtcccattttttacctttttcactgttttcccgtttctacgtttcaatatttcgtggcacgccgttgatcgcccagttgtttatgatttattacggtttaccgcaattcaacattgaactggacccaatgccggctgcattgctcggtttatctctaaataccgccgcttatacctcggaaacgctaagggctgctatttcttctattgagaaagggcagtgggaagccgcggccagtatcggtatgacgcgctggcagaccctatatcgggtgattctgccgcaggccgggcgtacggcgctcccgccgttgggcaacagctttatcgggctggtaaaagatacttccctagcggcaacgattcaggtgccggagctgttccgtcaggcacagttagtgacttcgcgtacattggaagtctttaccatgtatctggccgcgtcgttgatttactggatgatggctacgttgttgtcggcgttacagaatcgactagaagcacatgttaatcgtcaggatcaggagtaacgatgagtaccattgaagtgaagaaattgaccaagcaatttaacggtcaacaggtactacgtggcatcgatctacaggtaaatactggcgaagtggtggcgattattgggccgagtggctcaggtaaaacgaccttgttgcgtagcattaatctgttggaaattcctgactctggcactattcgcgttggtgatattcagattgacggttctaaacctattagtaagcagcaaaaacaggtacgagcgctgcgtcagcaggtggggtttgtgttccagaacttcaatttattccctcatcgttccgtgttggaaaatatcattgaagggccggtgattgtgaaaggggaaaagcgcgaatccgcagagaaaagggcgcgcgagttgctggcaaaagtcgggttgagcggcaaggagaatgcctatccgcgccgtctttcgggtgggcagcagcagcgagtggcgatagcaagggctttggcgatgcagcctgaagtgattttattcgatgagccgacttcggcgttggatccagagctggtgggcgaggtattaaacaccattcgagctttagcggaagaacgacgcactatggtgatcgtgactcacgaaatgagttttgctcgcgatgtggctgacagggcgatctttatggatcacgggcagatcgtcgagcagggggtagcgaaggcgttgtttgcaaatccgcagcatgagcgtaccaagcagtttttagataagtttctgaataatagataatgtttgggggctggtttcgaaagcccagcagttcactgtctcctcacttaccgtggaggcttccgagccgggttggcagttgcccaaccctgcacccgggcttggcgcgaaagtggggttctgcgaacctccctcgggcgcgcttcgtccggcgagccagcgctagattcgcctgcgggcgttatcaggatgccatgccatcctggccctgcggctcaaggcgcgctttcaacagctgacggctgttcactcttggcctcatccctgctcggcccgcttcctgattgcgcctgttgagtgcaaaaccagtgttcttacgaatcacaatttgcctttcgtttttgatagggcttttgacattgagtttgatttttcagagcacatttgagcggctgagacgatgagtgagggaacccacgcagcgggcaggcgatacgtgcggaggcgcggattgttaaggctgtggaggtgagatattcaccaagataatatcaatcgaaaccggatgcgatctcaaactagctttagatgccgaacctaaaaaataaaaaggctcctaagagcctttccgtttatacataaaccaaccatcaaactatcagccgatagtcatcaaactggcgttgccaccggccgcggcggtattcacactgagggaatgctccactaacagacgctccagcagaatattggtttcaccgcgcgcgaagccctgtactgacacaatcgcgccgtcccgctgcgccacttgctcgcacagggtacgtagttgatcggcatcaccgtgataaatcactgcgtcaaataccgctttctcactttgccaatccggcgtcaaggccattcgactctggacggcagcaggcaagcgacggaataattccttctgaataccgctgtccggccatagtacctggctgccaaccgacagcactgccgccagctgaatcaaagcatcttgctcattatccgctagacacagcacccgctcacgcggcagcagcgcataggtattgcgctcaccggttggccccggtagcaggcgaatagttccgccctgagccaggtcactgtagcgttcagccaggctaacgagatcgtttcgcttctgttcattagcccagctaatcagtgcgcgatgagcggtcagcagggattcacgtgcggtgacgtcctgtggatgctcactgtcctgacgcgccaaggtcgacgttaccgcgtcttccggacgactacacagcagacgatacagatacagcggcccgccagctttcggccccgtgccggatagtccttctccgccaaatggttgcaccccaacgaccgcaccgaccatattacggttgacgtaaaggttgccgactttagcgcgatcggtgacgcgagcaatggtttcatcaattcgggtatgaatacccagcgttaagccataaccggaagcgttgatttgatccaccaacgcggtgagattctggcgctggaaacgcactacgtgcagtaccgggccaaagacttccttttgcaactcgtcaaagctttccaattcgatcagcgtcggtttgataaaggtgccgcgctgccactctttctcatcctgagtatccgcctgcgcggcctgatagactttgcgacctttggcacgcatcgcctgaatatggcgctcaataccggctttggcctctgcatcgataaccgggccgatgtccgtagacagacgctcaggattacccatacgacattccgccatagcgccacgcagcatttgcagcgtgtgctcagccacgtcctcctgaatacacagaatacgcagggcagagcagcgttggcccgcgctgtcgaaggcggaagcaaccacgtcggtaaccacctgttcggtcagggcggaagaatctacgatcatcgcgttcaaaccgccggtttctgcaattaacggcgttggacgaccctgaggatcgaggcgaccggcaatgctacgttgcagaatgctggcaacttcagtggagccggtgaacatcacgccgcgcactcgcgcatcattgaccagcaaggcaccaacgctgtcaccccgacccggcaacagctgcaatacaccctgcggaataccggcttccagtagaatacgcaccgcctgagcagcgaccaacggagtttgctccgccggttttgccagcacgctgttacctgcggccagggctgcggcaacctgtccggtgaaaatggccagagggaagttccacggactgatacaaaccaccggaccaagtgggcgatgactgtcattcgaaaaatcatcccgaaccattccggcgtaataatgcaggaaatctaccgcttcgcgtacttctgcgatggcgttgctgaaggttttaccggcttcgcgcaccagaatgcccatcaggttttgcatttgagcctccatcaactcggcggcgcgtaccaaaatggcggcgcgttcagtcggcggcgtggcaaaccagattgggccagcggctgcggcagcatccaatgcgcggctgacttcatcagtagtggcttcacggacataacccaccacatcactcggttctgccgggttgatgaccggttgttctacgccgccctgatctcgttcggcatcaataataggttctgcaagccaggcctgagtggcgctggttaatagtgcgctggatagtgaggccaggcgatgttcattggccagatccaaaccgctggagttggcgcgctcacttccgtacaaatcccgaggtaatggaatacgtggatgaggcaatcctagctgaccttcagcggcggccagcgcctctacagcggcaaccggatcggcgactagctcatctaatggcagcgttgcatcggcaatacggtttacaaacgaggtattagctccgttttccagcagacgacgcaccagataagccagcagcgtttcgtgggtgcctaccggtgcataaatgcggcacgggcgattgagcttaccatcggccacttttcctaccacttgttcgtacagcggctcgcccatgccgtgcaggcattggaattcatattgacccggataatagttattgcccgccaaatgatagattgcggacaaagtatgtgcgttatgagtggcgaactgaggataaatcaggtttggtacagccagcagtttacgggcgcaggcgagataagatacatcggtataaaccttgcgggtatacaccggatagccttccagaccctccacctgtgcgcgcttaatttcgctatcccagtaagcgcctttcaccaaacgaatcatcaggcggcgacggctacgctgcgccatatcaatcactgcatcaatggtgaatggacagcgtttttgataagcctgaatgacaaaaccgataccgttccaaccggctaactgcggctcgaaacacagtttttccagcagatcgagggagatctccagacgatccgcctcttcggcgtcgatattgataccaatatcatactgacgagcctgtaatgtcagggacagtaggcgagggtataactcatccatcacccgctcgtattgagcgcgactatagcgcgggtgcagggcagaaagtttgatggaaatacccggcccttcataaatcccacggccattagaggctttgccgatagcgtgaattgcctgctgataggaaatcagataagcctgcgcatcggcttcggtcagcgccgcttcacccaacatatcgtaagaataacggaaacctttatcttccaacttgcgggcgttggccagcgcttcggcgatggtttcaccggtgacaaattgctcgcccatcaggcgcatcgccatatccacgcctttgcggatcaatggttcgccgcctttaccgataatacggttcagagagctggagagtttagcttcattatgagtggagaccagacggccggtgaacagcaaaccccaggttgccgcgttaacaaacagtgacgggctgcggcccaaatgggaatgccagttaccgttgctaattttatcgcggatcagcgcatcacgagtcggtttatccggaatacgcagtagcgcttccgccagacacattagcgccaccccttcctgagaagaaagagagaattcctgcaacagaccttgcaccatgccggcgcggccattggcacttttctggttgcgcagcttctcggcaataccgtaggccagtttgtgggtcgcatcggccagatcggccggcaaacgcgcctgttccagcaacattgggatggcttcggtttccgggcggcgataggcggcggtgatggcggcacgggtgacagactgcggcagtatatgttctgcaaaatcaaggaatggttggtgggctgtttccaccgattgcggcataatgtcgtccttttcagcaggggaagccgttgccaacgctggaatttctggcatatcagcgccattttccaggcgttccagatagttaaatatggcctgcttaatcagccagtgcggtgtgcgatcaattcgttgtgctgccgttttaatacgatcgcgtgtcgcctcatcgagtttcacgcccattgttgtgctgcccatgccgtctggctcctgtcctaaattaagggagttatgttttttattcgtcacaatatctagcatgttgcaactttgtgcaaccatgttaaatcagggcaattaacgaactgtgaaattagtcggatttttaacattctttctgggcgcagttattactttgttttcattgggagggggttaacattactaaatacagggtttctacgggttttgctcagggtgcaactcactttagggtgcaaggtgaaaccgggaactattgtaaatgtgatgtagggtaaattttatgtaaattttttgttgaaagagttgttgctaaagaagagagtcctctaggatagtcagcgcgacaaattagtttcgatgataaatcatctcaggtgcaacctaatgctacgttccggcattcgcactgaactagacaccctgccatcgctggcgaggtgtttttaaactgatgtattaatgaaaaacggaagtattaaaacgtataaaacgcactatggagacgttgcatgatgatgaacacaccaatgctggtgacatttctcgtttatatatttggcatgataattattggccttatggcctaccgggcgacgaataactttgacgattacattttaggtggacgcagcttaggcagcgtagtgactgcactttctgccggtgcctctgatatgagcggctggctgttgatggggctacccggcgcgatttttctgtccggtatttccgaaagctggatcgctatcggcctgactttgggtgcctatctgaactggaaactggtggccggccgtttgcgcgtgcaaaccgaggccaacaataatgcgttaacgctgccggattatttcactagccgttttgaagataaaagcaaactgctgcgggtgatttctgccgtagtgattttggtgttcttcactatttactgtgcgtccgggattgtagctggtgcgctgttgtttgaaagcaccttcggcatgagttacagcaccgcgctgtgggccggtgccgccgcaaccatcgcctatacctttatcggcggcttcctcgccgtgagctggaccgataccgttcaggctaccctgatgatttttgctctgatattgacgccaattattgtcattctggccgtgggcggcatcgatacctcgattatggtgattaaagccaaggacgccgccaatctggatatgctgaaagggctgaatattgtcgcaatcctgtcgctgttgggctggggtctgggctactttggtcaaccgcatattttggctcgttttatggcggcagattcccatcacaccatccgtaaggcacgtcgtataagcatgacctggatgattttgtgtctggcgggcaccattgccgtgggtttcttcggtattgcttacttccagcaaaacccagagttggcgggacgtgtttccgaaaacggcgaacgtatctttatcgagttggcgatgttgctgtttaatccgtggattgccggtattctgctgtccgctattttggctgcggtcatgagtaccttaagctgccagctgctggtgtgttccagtgcgattacagaagatttgtataaagccttcctgcgtaaaaatgccagccagaaagaactggtatgggttggccgtatgatggtgttgttggttgcggttatcgctattgccatcgccgccgatccggaaaacaaagttctgggtctggtgagcaacgcttgggcaggtttcggcgcggctttcggccccgtggtattgatttccgtgatgtggtcacgcatgactcgtaacggtgcgctggccgggatgctggttggcgcaggaacagtgattatctggaataagttcgcgtggttcgggttatacgaaatcattccgggctttattttcgccagtatcgccattgtggttgtcagcctgttaggccgtgaaccctcgaaaattgtgaccgatcgtttccataaagccgaagcagaattcaaaaccatttaagcctttcgattcgctcactgtccgttcaggcaggcagtgagcgccttccttatttatctaacctccatgacacaatatttccccaaccagtccgctcttataaattcgtatccctgaaataatcagacatatttattggcaacaatccgaacgagttccttgaatttcccgatggcagaatgataatcactatcgttttaagttttactttttttatcgctggattgataatcaatatcgctagtgagttttacctttctttacttaaattgacgttacccaccatcaggggtgttaagcatgtttgtcccatttcttattatgtttcgcgaaggtcttgaagccgcgctgattgtcagcctgattgccagctacctgaaacgcacccaacgcggtcaatggatgggagccgtctgggccggcgttattgttgctgtagcgctctgtcttgggttgggtatctttattaatgaaaccaccggtgaattcccgcagaaacagcaagaactgtttgaaggtatagtggcggcggttgccgtttgcatattgacctatatggtgttctggatgcgcaaggtatccaaatcggtcaaggttcatttggaaggagctatcgatcacgccctaaactcgggtcgtcgtcagggctgggcgctggtggcaatggtattttttgccgtggcgcgtgaaggtctggaatcggtattctttttattagctgctttccagcaggacgtcggcattggtgcacctattggcgctattttagggttaacctgcgccattattgtcggtatggcaatttactggggcggcgtgaaattgcatctggccaaattctttaaatggaccagtctatttatcctctttgttgccgccggtttggctgccggagccattcgcgcattccatgaagcgggactttggaaccattttcaagatatcgccttcgatctgactaatgtgctgtcaacgcatagcctactgggtaccttcctggaaggtatattgggctatcaggaagcgccgagcgtcagtgaagttgccgtttactttatctatctgatcccagcattgattttctttttcctaccgcagcgcgaactggccgcatccggtgctcgatctgcgaataaaaccaaccattaatcttatttttaggtcagggagtcatgacatgtctaatcggttcttccgtcgtaccgcactgcacgccgcgctgttggcgttgcccgctttcgctatcagcgccggcgcgcaggctgctgatgctaaagttccgcaaataaaaattactgttaatgataaacagtgtgagccaatggcgctgaccattccggcgggaaaaactcagtttgtggtacacaatgccagccaaaaagggctggagtgggaaattctgaaaggcgtgatggttgttgaagaacgtgaaaacatcgcaccgggctttacgcaaaaaatgacggctaatctggaaccgggtgaatacgacatgacctgcgggctgctgagtaatccgaaaggcaaactgaccgtcaccgccaccgaaggtgcagtagcgactaaacctgacgctatggcgttagtcgggccgattgcggaatacaaagtgtatgtcacacaagaagttaatcagttggtgattcaaactaaagcctttaccgatgcagtgaaaaaaggtgatttagcgctggcacgccagctgtatgccccaactcgtcagcactacgagcggattgaacctattgccgagttgttctccgatctggacggcagcattgacgctcgcgaagatgatttcgagcagaaagccgccgatcctaacttcaccggtttccatcgtctggaaaaaatcctgttcggggataacaccaccaaaggggcggataaatttgccgagcgtttgtatcaggacacattagagctgcaaaaacgtattaaagatctgacatttgcgccgggtaaagtggcgggcggcgcggcagggctgattgaagaaatcgcggccagcaaaattagcggtgaagaagatcgctatagccgcaccgatttgtgggatttccaggcaaacgtagacggtgctcagaagatagtgaatttactgcgtccattgctggagaaagccgataaaccactattgcaaaaaattgatgccaatttcaaaaccgttgatacattgctggctaaatatcgaaccaaagacggcttcgaatcctatgaaaaactgactgacgctgaccgtaatgctatgaaaggccctattaccgcattggcggaagatttggcacagctgcgcggcgtgttgggtctggattgaggttgttaacatggtaatgaaaatcgacccattaaatgggccgtctcagccatcagatggggcggaatcgccttcgcgcagacgcttgttattgggcatgggcgtgatgagcggcgcattggcactggggacgaataaagcggctcaggcggcaacggcaggttctgacatgaccgctgaaaagaaagatgagcgttggcaaaaacagccgttttacggcacgcatcaggcagggattttaacgccgcagcaagcagccatgatgctggtggcctttgacgttttagccacgacacctgcggatctgacgcgtttatttaaactgttgacccaaagaattgcttttctcaccggcggcgggcgtgcgccggaagttgatcctaagctgccgccgctggactcgggaattatcgggccagaaatttatcccgacaatttgactatcaccgtgtcggtcggtaactcattgttcgatgaacgttttggtctgcaggcgaagaaaccgctgcatttgcagaaaatgacccgttttcctaacgattcactagatgcaagcctgtgtcacggtgatattctgctgcaaatctgcgctaataccaacgaaacggtgattcacgcgctgcgggatattatcaagcatacgccggatttacttagcgtgcgttggaaacgagaaggctttatttctgcccattctgcgcgcagtaaaggaaaggaaacgccgatcaatctgctgggcttcaaagacggtacggcaaatcccaaaaccagtgatgtacctttgatcagccgggtggtttgggtgccggacaatgtgggagagccagcctgggcggtgggcggcagctatcaggcagcgcgtattatccgctttaaggtggagttttgggatcgaacgcctttgcaggagcaacaaacgatttttggccgggataaacacagcggggcacctttgggtatggttcatgaacatgatgagccggattacgccaaagatccagacggtaaagttattccaatggatgctcatattcgcctggcgaatccacgtaccgtcgaaactcaggaaaacctgatgctacgccgtggttacagctattcattgggtgtatcaaactccggccagttggatatgggactgctgtttgtctgctatcagtccaatctggaaaaagcctttctggcggtgcaaaaacggctaaacggtgaagcgctggaagagtatgtcaaacctattggcggggggtatttttttagcctgccgggcgtacctgatgcgaatcattatctggctcagggtttgctggaatcgtaattattgtcggtcattgagtgtctgtatggctgcggtatctgatgatatcgcagctatttttttactgattgtaatgaatgttttgtaataacaatcaaacttaaatttttatcaacggctagattaatcggcatagattaaattattttttaatgattgtgagtgataaaaaataacaacccttccacctgtaagtctcccatcaaaacgaacatttgctttctgctcctcaattaacgggttgatttttttgtttttttatatttattttaaaataattctgtctgtgtcattggtatgggttatttatcaatggtatatgttttttatcttaaatgaaccaggtatcttcatatggtttttacgttatgtaaatatgtaacgttgtcaaaacacaaccttacataataggtcgttgttaatatttctaattactttaatttagaatggcagctgcgagattaagcatttagatatcatcacactaaacttatcaattatattaatggaggtatttatgaaacaaatgactagagaagaatctcacttagtttctggcgcaaacggtattacgatcaataattctacggttacaatcgcatttaatccgtacaacaatggtatgccaccttcagtgtcaacgcctgtcactccgattgataatccaggggttatgcctacactggatcctattcctgttgctactgaacctttccagcagggaactctcataccaacgccgatgagccttcagttttatcaaagatattaatgagtcaaacttgatgatattgtggttttaattatcaattggtattgcatctaagctaatattcattgatcacccttttatcattaacaatagagttagctacggtgcatttatggccgtggctatttatatagctgatggttattttttaatggacgctgcgatggtgatttttatacggttagaggcctaggggaataacaagtaagaaaatcaatgacgagtgatatgtcatttgggtatgactacgctgatctcgaggtggatttttttattacaaacgtagtaaatgatatggaaacattatcaactctttagagcataacgttatgaccagagaaagtatatttcggaaagaagtattggataatgggaaaacaaaatggaacggtaaggcgctgttaataaaaggcgtttcaccctggattgttttaaccgtatctgttgctattattcttatgcttgttacgttacttacttttggtgaatatacgagaaggattaatattgccggagagattattaccgaatctcacgctataaatctgttttcccctcaacagggatttattacgcaatccctggttagcgttgggcagaacgtaaaaaaagggcagcagatttatcaaattgatattagcagggtaacagattccggtaatgtgagcggtaaaaatatggcatccatagaaaaacaaattattgaactggataatcttattcgacgagtaaaagaaaataaattctcaattgagatgaatctggaaaaacagatagagcaaaattcacatgcttatcaggagtcacttaagctcattgaagcctctaagaaaggcgtggctgagatgcagcgtactttagataactatcaggaatatcaaaaaaaagggctcatcagcaaagatcagttggctaatcagcgagcaatattttatcagcagcaaaatgcctatcaaagtctatatcgtcaaagtatgcaggaaaatacccagctaacgaccctcctaactgaaaagaatattcgcttggctgattttgataatcagatttctcagtatcagtatcagcgtatcgaacttcagcggcagctcactttggctgaatcgagcggtatgttggttatcaatgcgcccatagacggaaaaatagaatcattgagcgtaacgccggggcaaatggttaatctcggcgacagtttggctcagttaaccccaaaggaaaagaagcaatatcgcctggtattatggatacctaccagtagcgccccctatgttaagcccggagacggaatcaatatccgttatgacgcttttccatttgaaaaatttggccagttttccggacatattatttctatttcagccgttcctgcatcctctcaagaaatgtccacttataacaatattcccaaaggagcgaatcgtaatataggaacggcctactacaagacgctagtcgcaatggatgaccaatcgcttttatatcagggacgacaattgcaactctccaacggtttaacggcgcaggcaacgatatttatggagaaaagaccattgtataaatggatgttttcaccgttctatgacatgaaaaaaagcgtaggtgggccgattcatggataaattaacggtgaaggatctttttagtcgcctggattttaattttcgtcggcgggtgcccagaataatacagacagaggccgctgaatgcggccttgcctgcctggccatggtctgtggatttcacggatttcatgtggatttgtttaatttacgtaagcaatacggaatatctctccaaggggcgaccttagctcacctagttgatattgccactgcgcttaagcttaaaacacgagcgctatcattagatatagaggaaattgatcagcttaaaaccccttgtgtcttacattgggatcttaatcattttgtcgtattggttacggttagggcatcttcggtagttattcacgatccggcaacaggaaggaaagtgatatcaaaaaacgagttttccaaacactttaccggtgtggcgttggaactgtggccagccagcgacttcagccagaaaacacaaaagagtcgtttaaaactggctgatctaataaagaatattcggggactaaaagggttcctgattaagattttttgcctgtctctgttgattgaatctattaatttattgataccagttggtacgcagctggttatcgaccatgtcataaacgctgaagattataatttactggcactaatctgtatggggttagtcttttttacgctgttccgcaccttcaccagcgtattcagatactggttttctatagtgttagattcgctggttgatgtgcagtggaaggccggtttattcgatcatttgatgactttaccgctgtcgttctttaaaaaacgcagcttgggtgatattcaatcgcgttttgattcattagcaacactgagagtgacgctaacaaccagcatagtcagcgcgattattgacgggattatggccgtcggattactcattatgatgattctctatggcggctggctggtctgggttgctctaggatttacttcaatctatattttgctgcgcttgttaacttattattattttcgccaggcgtcggaagaacaaattattaaagatgcgaaggccaaaacgcactttatggaaactttctacggcgtctctacgattaaggcactcggcctaacggccattcgcgctcagaattggctcaatctcagcattgaggctgtaaacgcaactattcatattactaaacttaatatgttgtttggtggggttaactcactgattggcatgttagagcagattattattctctggatcggtgcctctctggtaatggatgggaatatgacgttggggatgtattttgccttcaacactttccgcggacaatttgctgagcgggcatcgaatttgatcaatctggcgtttagcttgactatgttaacgttgcactgcgagcgcatttcggatattgctttgtctgagggggaggtattaaaacctactcggacctttatcaaacgcggtgaacccgcggagctgaaaattcgtaatttgtccttccaatacgatccattttccaaaccgttattctcagaactgacgctgacaattgccgctggcgaaagcgtggccttggttggaccatcagggattggaaaaacaacgctgatgaatattatttccggtctgttgattcccactaaaggggaggtattgattaatggggtggagataaacgcgttagggctgaataattatcgggattgtatagcctgcgtcttacaggaggacaaattattttccggttctatcgctgagaatattgccagttttgataaaaatatcgatatggaatgggtgattgcctgtgcccgatatgccaatattaatgacgatatcgacagcatgcctatgggctacgaaagtattatcagcgaattgggagggagtttgtcaggagggcaaaaacagcgcttgctgattgccagagctttgtaccgccgcccgagcattctatttttggacgaagccaccagccatctcgatctcattaacgaagcagcgattaacttgagtattgcttcactgaatattacgcgaattatgattgcccatagaccttcgacgattgcgtcggcacagcgagtcattcaactggatcaactatcttctgccgctttatagcgccagatagcgacgattgacagaaaaggagggcgccgcaaaaaacgtgcgatgcccatttgatattaactatttaatttagcggtgatttttgcgacatgctcaccctggaagcgggcaatggctaactcttcattgcttggctgacgtgaaccgtctccgccagcgatcgtggttgcgccatatggcgtaccaccgcgagtgtgcgagacatcaaacagttccggtgcaccgtagccgattggtacaataataaaaccgtggtgtgccaaggtcgtccaggtagatgagatggtgtgttcttgtcctccgccggtaccggttgaggcaaaaacgctggcaactttgccatataacgcgccggatgcccataaaccaccagtttggtcaaggaaagtgcgcatttgtcccgccatgttaccaaaacgggtaggcgtaccgaagatgattccatcgtagtccgctaattcctgcggcgtggcgactggcgccgactgattgattttcccacccgccttggcgaaggcttcggcaggcatggtttccggtacgcgttttaccatcacctctacgccatcaactctgcgaaccccttctgcgatggcctctgccagcgtttcgatatgtccgtacatagagtaataaagcactaaaattttcgccatctcgccgttctccaattttctataggatgatgttgatgaagggataatagtgagcacataagactcttattaaacatactccaataaggcacaggcgcaactgcatagaccggcgtatttttagctttaaatgtgatgatgcttaaagtgtgggatgatttaaggtttacgcaatttattttgtagtcgcttctgctgccagcggtccatccaattacccagaacaaaaatattgattgcctgaatggacaaagagataccgaatcctaatactacccacccgatccagtaatactgaggagaggtgaaccagttaatcacaaacaggaacaggcaaagtattagcgagcgaaacaatctgcggaagaagttcatctctttttcaacggccagacgcgcattttcaacacgctgatcgatagggtcagtcgcttccttattttctcctgcggtttcgccttgttcattaactaaatacagctcattcaccttcaattccataacagcggcaatagcgcttaaagtttcaaggctagcttgttcgccattttcaatacgttgtatggtacgaacgcttagggaggccatttctgccaactgttcttgtgaccaacctcgtgccagtctgagctctcgaacccgataaatggccatatctttcttcctgataataaggtgtgttctcccagcatagaacgatgcggaagatgtcaccacgacaagcacctgacactaggatgacagccataggacaccaacctgacagcgtaattatccgttgaatactcacataacgacacttgtttttacttatgacggtgacccagatcccaccttgttattgctctccgtaccgcatttatatatcggctatgcttggcgctaaggtttaattaaataggatatttatggactcaatattgtgccgcgacgcagatgggtgcctcacgatagtgcaagttgtggtaaatggatggctgattaaacgtttctttatcgatggagaagtctggggacctattgaggttaatagcgcggatgaaatggtgattctaggtgtgaaattttcagaacgaggctggttaagtattaagggaacaattcattcagaccctcaggtattacgtcgacaattatcctgtgggtgatcgtattagtttagacagcttgttactgtagtttcaatatgtgttagaagaaagaaagcatcgatagcagggaggggcagggagaataaaggtgagtagattactattaagcttatctatataaataacataataatcccagatgaagagagaaaagaaagcgtggttttggctgacccaataccacgcttttttatcacctttaaatggtctggcttatcagccaatcattccaacgggctatttattatcatacaaacgggttctgcgttttttcaggagagtgtaggacactgccagaataacaaaccacaacggcgtgacaattagcgcctggcgggtatcttcctgcaaagtcagtaacactaatacaaaggcaaagaacgccatacaaacccaagacataagaatacctgcaggcattttataaatggattttttgtgcagggcagggcgacgtttgcgatataccagataagaacacaaaatgatggtccaaacgaacataaacagaatcgcagatacggtggtgaccaacgtaaatactgtcataacgttaggaatcagataaataagaacgactccgcctaataggcaaatacatgaaaaggttaagccggaagccggaaccgagcggcgagataacaccccaaattgtttaggtgcatcgccttctttagccaaaccaaacagcatacggctggtggagaatacgccactgttggcggaagaggccgcagaggttagtacgacaaagttaatcacgctagctgctgcaggcaggccgactaagacaaacagctccacgaatggacttttatcagccaccacggaactccacggggtaaccgacataatcatgatcaaagaaaatacatagaacatgataatccgaatagggatagagttaattgcgcgaggtaagacgacttccggatctttggtttctgcggcagtggtgccaactagctcaattcccacgaaagcaaatacggcaatctggaacccagcaaagaaaccgctaattcctttcgggaacatgccgccatcattccacaggtggttgaacgaggccacggtgcctgacggagactggtagctcattaataccatggttaaaccggcaaaaatcaaagcgacgatagccacaatcttaatcatggcaaaccagaactccatttccccgaacatttttaccgtggcgagattcagagatagcagtaatagaacgactagcaaagaagcgatccactgtgagaagcctgggaaccaaaattgcgcataggcggtaattgccaccacatcggctataccggttattacccaacaaaaccaataggtccaaccggtaaagaaaccagcccacggacccagaaggtcggcggcaaaatcgctgaaagatttatatttcagattcgataacagcaattctcccatggctcgcatgacgaaaaacagcatgaagccgatgatcatgtagacgaaaatgattgatgggccagccagactgatggttttccccgatcccataaacagcccggtgccaatagcaccaccgatggcaattaactgaatatggcggttggaaaggtttctctggaggtgttcttctggctcttgttccgattttattgctatcttggattggtctaccatctttcccattccctcttcctgtgttgtgatgtttttttgagctctaaattggctctttggattatttactctgtctgtcgaactctgtcatttggggcatgcattaatgaagatagattacatttaatatactagtaacatttttcatacaatattctccatattgcatgatggctactgtttaaatttcactcagtgatatttgttaactgcatcacaataattagaattacaccatgttccctgacaactaacaataatcgcctgcgttactcgcttaattaatgagttgtcgccatatagagcatatgataggcaaaaaaatgggatgaagtgtttgacacccacagccaacaggagaataattctcgcgttgggtcgttagctcagttggtagagcagttgactcttaatcaattggtcgcaggttcgaaccctgcacgacccaccaacgaaatcaatcaattagaattagtctttaatttaaaatctattccacgggacatatttgggacccagtgattaaatattgagtctatttttctggcatgtttatttaaatgatttggtgaaagatttgcatatttcttaaccatttaaattgattcccatccgcccatttcttttaatgcagaaataggaactccagattagactagccagcttgctcacgtatgccttaaatcacgaaatctaaaattatttattcccgctctctcatgccgaataccaagctctgttacgatcaattctcaattctcaatttccttatttccggtgttagtgacccctcggatctatttgaagcatgaatgcgaacaaagatatatttatcaagcttccctatttgttccctacgaaattttgcgacagtgtcatttagggcttagccaatagtctttctgatttgctatcttccaggttcatccaggcaaccttcctttgcatatctatctgttgccagtcccggttgattatattggagcggcctaggtcggtagaaagagctaagcgaacttcagacttcagtggctctgggcatttatttattcatctgattgcctcatagggttcaagccaacggatgcgtttgttctttggtcgagggactttgtttgaacagtcctgccttagctagccatctccactctctcggcggttctcattatcgactccattaatgaaagatgagcagcctccgccgctaaggtttttatctgtgtcgacagatcgcttctctgatttctcgtcaatccagagtaaacaggcctcttcgaacatgatttcaggcatttcgcttcgatttctttggcgtggattatggctcttacatcatgggttacttcaacaccacgtcatggagttcagacttcgctacttgctccggtgaatggaaggttgcggattcggtcactttcgttgatgactcggcaattacagtcaccagtgtaactatgatcccggcaacgagtagcggtgtagcgggttcgactgttcaattaacaccgaacgtctccccaactgctgcgacaaataaaactggcgtatggacaagctgctatgcgaccaaagcagcggttagctcaagtggcctagtcactcgcgttgccgttggcacagcgataatcacattcaccacgaatgatggcgctaaaactgcctcaagcaatatcactatcactgcgtaaatatcacaaagagcatctattggtactctttgtgatatttatttcaaagctgaacgatttaaacgaacaacatcgcgatattgatctacattaccaattatacccttatctttattactactatcgttaattgtggaaataagaagggcaatagatccataaaaaataaaatgaagattgggcttctggtattgtgtatttcatctctgtttcaaattacagcaaatgcgaatgattcaatatcaagtcgcaaattttccgcagttaatcgagcgaaatattgaaatatttccttcctgtgcttgggcgcacgataaagaaggatatgtgatgattgcttatgacattaacgtagccggaagggttgagaatgcaaagattgttgaggttgaacctaagaatctcttcgagaaatcagccttggactctatctacaaatggaagtatgagcctaataagccaaccagtggaatgggcgtcacaataaactataagaggccaaagtgaggctgtaagtatggggaccgatccgccaagagcaggtttgcgcattctagcgctcacggtcaatgaaaaagacgtgaccgcactatgagttagcggccacatttgagcaagtgcctatgtggaatagtggtcagagcttcactattttactgacgttaatctcacgccctcttgccgttgatttatttttcaccttgtctttggcaatagataaggcaacgctttcgctttcagcttcgaccgtctcagacgtagtcgcggtatttttaccaccaccttgggagtactgaattaagtcgaaatgcactctataccttgccatgtgggttcctttttaatttaagtcctaattttcaagctaatagacttcatttattcatgttttaaaacatatctagtcgttaaccagaatacagggttattactgatttaataacctgatatttcaacagtagttgcttttagggtgacatataaatggttaatttatatgcaatatgcctgcagaatttattatcgagagtattgacgctggtgttggcgtgatgattgacctgttcgaggtcgatttacagttatttggcggcgatgtgattcgctctcactcgggaactcattgctactatacgatgctatctggaaaggtcctcaatattcagcctatccaatcgtagttgaaggggggcgaagttaagtcaaaagggacatactcgtagctttcccaattaacagaagattggtcagacgatgcttttcgctctgaaatgaagatttttcacttataccttggttaaactgctgattcaacgagaaagcaaagatcacatggttaatgtaaacagaagttatacttcataattgtaaatggttattattgttatttgtgttttaaacggttatacgcgtccaatataagaaggctaaatgcaacttattttgtttaaattacggtttaataagtttgagccatggagggagagaatgactcaaacggataaaaaaatatgcactcaaatggctttaatggataatggcataaatttattttcaggtcggaatccaaccggttaaggctaagtgctttgatatataagataaaaaacagatgataaacacaataaaaaggcgagggatagagtgatgcagatgaaagtcacggaaaacgactgacggtacagtttacggattaataaagacgtcatagttggaatctcaacgttactgcagcgtgaatttaatccatagggtattgtttctttatgtgattaatccatatctacattattaatgattataggatggttacctttttggcattcatgttttcctgcctatttgaattaatttcgtcctttctgtgaacttaatcacacttatttatttgttacaaaaataacaaactaggtaataccttcactctttatcaaactaagccatactgaaaaacaacttgattttactgcggagctattctctttatgaagaacccgacgcttattcaatttttccattggtattccccaggaggaggtcaactttggcaagaggttagtgataaagcctcgcaactgagagagataggaataacaatagtctggcttccgcctgcgtataaaggtgcgtctggtggttattcagtgggctatgacacatatgatttatttgatttaggcgagtttgagcaaaaagggaatcgtgcgacaaaatatggtgatagagaggcattacaggctgcagttgagcgtttgcaagaatgcgagattcaggttctgtatgatgtggtattcaatcacaaaatgggggcggacgagaaagaaccggtaagagtatcgaatgttgaagagaataaccgtaatcaaattgctgacgaaataatagacgctcaagcttatatacgctttacgtttcccgcccgctcaggccagtattctcaatttatttgggatcagacttgttttagcgggatagattctattgaagacccatcggctaatggcatattcaagattattaatgattatggtaatgatggttggaacgatcaggtcgatgacgagttaggtaatttcgattacctgatgggggctaatatagagtttcgtaaccctgccgtggtggaggaattaaagtactggggacgttggctattggactcattaccctgtaatggtttccgtctggatgcggttaaacatattcctgcatggttctataaagagtggatagatcatgttcgggatcatgctcagcatgaccttttggttattgcagaatactggtcgcctgatattggtaaacttcagaaatatctcgagcaggtggaaggtaaacttatgttgtttgatgtggcgttacaacataagtttcatcaagcttcaaagtctggtgatagtttcgatctcgctcaaatatttgccaatacattggtggataccaatcctatgaatgcggttacgctggtggctaatcacgacacccaaccgcttcagtccctcgagtccccggtcgaaccctggtttaaacctctggcatatgcattaattttattaagggagcagggggttccttgtatttttcaccctgatctttatggtgctagttatcaggatgaaggcgacgacggggaggtgtatcaaatagatatgccgataattccagaattggagccgcttattcaggcgaggcagaaatttgctcacggcgcgcagacggaatattttgatgataataactgtattgcatttgtgcgttcaggcaatgaaaaccaacccggctgtattgttatcatgactaacggtgctgaagctgagaaaaatatttttttaggtgaagatttcaaacatcttcgattcggcgattttttaggtaatcgaaaagatatcgttattattgatgagcaggggcatggggtgtttagggttaatggtggcagtgtaagtctgtgggtacaggaagagttcctgtgagctcagaggcgttacatatgcagttaagtttgttagtagctgactaataattaagtaaatgtaatgtttatgttttcctatttgtttttattttgcccttttgtactgaaaaattactatttttagtgcttcatactttatacctatttgtgattagcttcagaaactgaaaggttataaggtaatggtatcgcttatttgtgtgataaatcgacgagttaacaaagggagtaacaaatgcgatttgaaaacaaagtggtcgttattaccggtggtggtaatgggatgggggaagctgccgcccgtcgtttctcttctgaaggtgcaattgtggtactagctgactggaatcaggacgccgctgaatcagttgcgcgctctttgccagaaggtaaagcattagcatatccaatcgatgtctctgaccatgtagccgttaaaaagatgatggacagtattgctgaaaaattcggtagaattgatgtgttactgaataatgcgggtgttcatgttgcgggtagcgttctggaaacaacggttgaagattggcgccgtattgccggagtggatattgacggggtcgtgttctgctctaaatttgcacttccttatttattgaaaaccaaaggaagtattgttaatacggcatctgtctcaggtctaggtggtgactggggtgcggcgtattactgtgctgccaaaggtgctgtcgtcaacctgactcgtgcaatggcattagatcacggtggtgatggcgtccgtattaactcggtatgcccgagtttagtaaaaacaaatatgaccaacggttggccacaagaaatccgtgataagttcaacgaacgtatcgcattaggccgcgcagctgagccagaagaagtggccgcggtgatggcgttccttgccagcgatgatgctagcttcatcaacggagcaaacattccggttgatggtggtgcgactgcatcagacggtcagcccaaaattgtctgattaaacgttcaagcgttttactctgtttacctagtctgagctgagtccgaaagtatggcgattcagctctgatggcattcctttcatcaataaaattatctctccatctacctatctgcctaagcctttcgttgctgtcttccctgtttttaacttatttttgaggtgtttcctgcgtgattctgatttttactgctaatcttttttaatcattaagctaaaaaacatcgttaaaatcgaaaaattgcaataacaagaatcaactaattcctcaaaataggggaggttacatgactcttggtattaaattttgcattttatttatttgtgtaggtttaattactatcaaatagcgcctttattagcttcatattcttatatcttttttgaataatttatgacatttaactcttggtcatccctacgtaagttaacagctacattatgagccaaggtgtacaacgatgatttttgtcattttatggtttgttattgccggattaagtgagtttttagtttggggccgccctttacttatggcgctgttatcactgatattcttagctgtagggggactatggatttataaggtgagaaagatacaggttaatactttgttaccgtcagaaggaaaaacaaagcgtatcagtaacctaaacctgatcttttccgtaggtattctggctattcatgcgattacgcttttattgtttggctaattcaatcaatgttttgtttaatttctgttcgatcatatctttaagctatttgttgatatcggttgtcatgaatatgactaattatgccaatagttccagccgagtatccgcatccatgcagctaaactccaacagattacagctgagttcagtgctagggaaaggcctgagtggtcgagaaagaagttaaagggaaatcaggtagataagatacggaattaccgcccaccttccgtaggtgatagtgagacgtaaagcttcgattgaacgtttgctacccacaatattatattgtgcgatcggagcaaaggttggaaacagcggaattaacccggcaatttagtagtttcacgttttgaataacagagcaataagaatcacgactactgcgcctaacaatgctttgattaacagactcataccaatagatgggatcagcatggtaacagtttacttgttgataattaataaattgtaactaacagacccaatgggtatttgggtctgtatcagacgcgcgtaatgttattggcggaaggcgtgtttgatttgtgcaatggtattttcgaacacttctgcctgggttttgtcttctatcagaggtaaggatctttccatcttcagaataactttacctgcgtctgcctggccaattgccttgagcatcaatgtcagcgtggttttcaggcatgtaacttcgtgagctaaagtctcaagatcggcggcagtagtgaagtctgtgttactcatagtgtctcctaatggacattgttgccgcgtggcttatcctcatattggcgtgccattgaggttaaaagcagcattttttacagttacctcattatatcacagcgtaatgaataactctgcgcacggtaattatttgttaggatacacacagatactgaatactctctacggaattcggataattctcaactgagccacataatgaatttttatgctaaataactaagaacttgtgcgtttacttaattaagttcataaagtttacggttagccatatgtttaaataatgacgatagaagactaattcaggttttttaatgtggtaatcctgtaactgtggcagagttggcatgctaggaattattcttatatgatgaatgtttgtgcagaaagtaattattcataacagtatcaggtggttgtcttttttaaattagaaaaataacttgttgtaaactatttattgcactaataattagttatttgagtagattgtgttgtaaaattcatcacttattttgggatgtattttcctttcgttgaccgctccctttaataggccgacttgccaaactaatggcggatgaaaagcgatcgcgataaaaataattctgaccaaaatagagatgtaaaattacaattattctgtattcattctttggctgaaaacaagtaatatcactgccgtaaacaaagagtgattaggttactcccttatttttttggagaattttctttgattagcgttcttcttgttgatgaccacgaactggtgcgcgcagggatacgacgcattctggaagatatcaggggtatcaaagtttcgggtgaagcgcagtgtggcgaggatgcggtaaaatggtgtcgcaataatactgttgatatcgttttgatggatatgaatatgcctggtattggtgggttggaagccacgcggaaaattctccgtttctccccagatatcaaagtcatcatgttaaccattcatacggagaatccgttaccggccaaggtgatgcaggcaggcgcaggaggatatctgagcaaaggcgctgcgccgcaagatgtgatcaatgcgattcgggccgttcattcgggtcagcgttacattgcttctgatatcgcgcaacagatggcattgagccagctagagccgcaggttgatacaccttttgcctgtctttccgagcgcgaattgcaaatcatgctaatgataactaaaggtcaaaaggtgaatgaaatctcggagcaacttcatctcagtcctaaaacagtgaatagctatcgttaccggatgtttagtaaactaaatataagtggtgatgttgaattgacccatttggcgattcgccacggtctgtttaacgcggagacattgtcaaatagtgactgaatgctttgatgcaaaagagtttttgaaaacagtaaccagccagcccggcgtctatcgtatgtatgatgccaagggtactgttatctatgttggtaaagcgaaagatttgaaaaagcgacttaccagctatttccgcacgcaggtaaatagccgcaaaaccgaaacattagttaagaacatcgctcaaattgatgtcactgttacgcatacagaaactgaggcgctgttgcttgaacataattacatcaagctttaccaacctagatataatgtgttgctgcgggatgacaaatcatacccacttatttttctcagcgcagatactcatcctcgccttgctacgtatcgcggagccaaacatgagaagggcgaatattttgggcctttccccaattcctatgctgtgcgcgaaacgctagctttgttacaaaaactttttccgattcgacagtgtgaaaacagcgtttaccgcaatcgctcccgtccttgcttacagtatcagattggtcgttgcctgggaccttgcgtgagtgggttagtcagcgatgaagaatatcaacgtcaggttgattacgttaggctatttctttccggtaaagatcaacaagtactaactcaattgatttctcgcatggaaaatgccagccaattgctgcattttgaagaggcggctcgtattcgggatcaaattcaggctgttcgacgagtcacagaaaaacagtttgtttccgggaatagcgaagatctggatgtgattggtgtcgcctttgactcggggttagcgtgtgtgcacgttctgtttattcggcaaggtaaagtgctgggaagccgcagttactttcctaaagtgccgaatggtactgagctgagcgaggtggtgcagactttcgttggtcagttttatttacagggcagtcaggcgcgaaccttaccaggggagattttgcttgattttgcattggtagaaaaagatctactggctgaatccttaagcgaacttgcgggacgaaaaattcagattcaaagccgaccgcgaggtgatagagcgcgttatcttaaactagcgcggaccaatgcggcgacggcgttagtcaccaagctatcgcaacagtcaactatccaccagcgaatgaaagcattggcggaaacgttgaagttgaatgagataaaccgcatggagtgctttgacattagccataccatgggggagcagacggttgcctcatgcgttgttttcgatgcgaatgggccggtgaagtcagagtatcggcgctacaatattaccggaattactccgggtgatgattacgcggcaatgaatcaggtgttaaaacgtcgttacggcaaagcaatagatgagcaaaaagttcccgatgttatttttatcgacggcggaaaaggccagttgggtcaggctattgaggttttttccgaactggatgtgccttggaacaaacaaaaacctttattaataggtgtagctaaagggagtgaccgtaaggctgggttggaaacgctattctttgccgcagaaggtgaggggatatcgctaccttctgattcgccagcgctgcatttgatccagcatattcgtgatgaatcgcataatcatgcaatcacgggccaccgacagagaagatcaaaagtaaaaaataccagtgcattagagctgatagaaggcgttggtccgaaacggcggcaaatactgttgaagtatatgggcggacttcaaccgttacttaacgccagcgtcgaggaaattgcaaaagtgccaagtatttcacaagcattggcagaaaagatctacaatgcattgaaacactgagcgtaatattgcaccatactcattatatccttactcgccagatagctatagaagcattatgcaattgaatataccgacttggctcaccctgtttcgtgttgcacttatcccattctttgttctggcattttacctgccattcgtttgggccccggtgttgtgtgctggcatttttgtattcgcagcagcaaccgattggttcgatggatttttagctcgccgctggaagcaaacgacccgttttggtgcgtttcttgatccagtagcggataaagtgatggttgccgtagcattggtgctggttgccgaatattatcaccaatggtggattactttaccggcagccaccatgatcgctcgtgagatcattatttcctcgctacgcgagtggatggcagaaatcggcaagcgtagcagcgttgcggtgtcctggattggtaaagtcaaaacgacggcgcaaatgatgtcattggttggtttattatggcgtccaacggcttacgtagagttggctagttttgttctactttatatcgctgcggtgctgactttctggtcaatgttccaatatttaagcgcagcctggaaagatttgctcgaaccttgatcgaagtgccgcaaaaatcagcaaacggacgttttagattgataattttattgactcattgcgtcaggtaagtagaatgcatcgcatcagacggcagcaacgaaacgccgaaagatagcaaaaaaatcagtaagttctgatgttgcgggaatagctcagttggtagagcacgaccttgccaaggtcggggtcgcgagttcgagtctcgtttcccgctccaaatttggcaggcttgcagaaatgctagtctcagcagtaaggcaatgaagaatacggcgcgttggcagagtggccatgctacggattgcaaatccgtctacctcggttcgactccgggacgcgcctccaattttcctgagcccgggtggtgaaatcggtagacacaagggatttaaaatccctcggcttatggctgtgcgggttcaagtcccgccccgggcaccatggaaaatagtataagtaaaacaaagcagtatgagtatgtcgttaaccgccgagaggcggtttttttgtttctggcgtctgccgaatttggcgaagtggcgaccaaatgactacattgtgtctacgacctttttgcccccgtttaaagccctgccaaatcagcatcagcttgcgctggataaaattctcctagaactgaattgcttcggacatctttcttgcaaccaaaggcgctgatataaccgatggcacgtcactgcgggcaaatggtcgccagtgcggtggcaatctccaaattatccagcctcggtacgcccggaatacgcggccggacgccggtcacgatctgggcggctaacagggctttcatgccggtatagcggccattctcgtctgacctgccgataatattgggagtgatttcggccgcatcgttgccggtagtcacgcgtaccacaatgttgaccagcttggtctgctcggcaatggctaacagtgatggcgccagcgtatcttttttcctggttttccccggcggcggccaatacatcggtgatcagtatcggggtattgaggggaaaggtcttagcgtcggcggtgccgaccatgccaacaatagcggtggatacggtggaaataacccgtgtgccttcgttaatttcgaggacacggacgccttggtgataatcattcatacagtcaatttttgtgaatggaggggtgaacctatggtgacgaatttgtgggtgggggtaccagatgagggatgtgtgagctgtggcacaataaaaagcgcggaatacattccaggataaaattaaagctgtatcagtctatggtgatttgtactaccttatttctgacgttactacgactctatttctgcttgtttgggactcttttcatgctcagtatttttcatgattattcgggcgctattgttaattctgcccttggtgtcttatttacatttatttttagcttctttttgagacgacgtaatgatttaagttggcaaaaatttgaggacagctcctgggataaaagaatgctcgccatctcaaaattcggtgagctttattttaaaccgaggggggattttaatagacttgaagtccagtatttatcaaagtttctgacacatagagcggaagaaaattactgttttgctgttttacagtatgtgtccctaagaaaggatctaagtgttgatgcgacattaaaggtagccagagaacactctggcttagttgatatatgccctgatggttcagcgaggatgaataagaagaaagtattgatgagtcttcttcttttaacattattctccatttccatgggatattgggttcctgtgagagctatatcccttctcgacgacgtgatgaagacatcctctaaaaatgatttattggtcgtcatccgatattgttcatggttattttccgtatacgctatttatgtggtcattaggcaattaaaagcattgcatgaatttagaaagttgattgagaaaataaacttaacaatattattaggtaagttgaaaagggcatctgcgtcttaaaaaagagtgggtaatccccacatattgatacttattgtgagggtttaaaagcgccatgtgattagatataacctatggaacacatggtttttctccggttaagcgttcaggcgctatgatgccggattgttgagcacggaacaggtgatgggcgttgtgcggaggatggcacaaacatctgagggggagagcagtaacgccgcaaaaatattattgcggcattaaaatatcaggtcaatttattgactatttttcagtaaccgaatcgttttatcttcgatgacaaatcgcttttcaaatgcagcaccaatcataacaccgccccaagcatggctgactaactcattgaccaattcgcattcagtaatcaatggcctgaaaacttcggtacttacttccagatgtttaatccctgtgcctttcttggagttggtaggtttaaagcctgtccccgttgaaaagtcattatcttctggagaagaccaaccaataaaccaagttccatgaatgatttcgtttctacgttcaatcaggttagtcacccgattattgattttagctaatatgtttttctgttcctcatttagctctgcgctaaccataagaacggaatgaaaagcctttgatagtggataagctgtcagctcagccgtaagggcatgggtgatttgttggttctgcaacccgtggcgcccggatagcgctacaatacctgttctcatagcaaaacaaactaattcaaacttggctgtaaattcgcccaccaaagcatattgctcctgggtttgtgctaaccttctggcttcccgctcttgatctgacatcagtctctataccatttatttaaatcatttattcgcacagaaacgattgaatttctggcaaccgtgccaaacaatataaacgttattacagtgctagcacatgctcatctggtgtttattcagattgtttggtgccccaacccatatcgccaaacctcattagacagcgtagccatatccgccagtacgctggtgacggtctccgtcttcaacgtttacagcagaaccagactgtcatttttatcattactatgagccacttacagaattctctcgacaggctgcgccgctgttttcagtcgtgagatcaatcgccgtcagcgtcacgcggggttcccagcgcatgactgcgccatacaccgccgccatcattttgagccgtaaggcggggttctgcggctgatcaatcagcgtggacagcagcgaaccgtattcccgacgcatcactctggagccttgcggcgtgattaaaatatcgctgatagactggcgaatgtgagccatatcggtaatggctttacctgtctgcgcattcatgccgagataagtcattgcggccccccggaggaatcaccgccacctttgacgccgccgtgttgatgggtgtgaaccacaatgccgtttgaggtcagattgccaccggaatggttaaagttgcctcgcgcctcaccgccttcttcaatcagaagggttcgggtaatcaggtgttgagtacatttcaccactggcgtggtgagggtgatcgaggtttcggccacgatattggcggttttcatgccggtaatggctaaatgacgggttgtaggttcatattcaaatctggccccatcgggaaatgtcactacgatggcatccgctgaagccgagggtgcagggttgctatcggaaaacaccgcgggcaacacaaaagcggtggtgagttcgccgccgatactgaggataatcacctgttcccccaccgagggcgcagcccaaaagcgcacccgaccggcgcggggcgtcagccagttcaaccagtcggtttctagctcgcccatttttacccgacataaacctttgaccgtatccacttcggatacaatgccgatgcggatcagattcgccagggcgcgtttaagtgctgcaataagcgttttcattcagccagtgtgccgcgtgcgggcgcgactggcatgtgataggggttgtgtgagggatggcacaaagaattaactgcaaaaagaataaacgcgtgtattaaaggttaatcaaaatgtgaacaatatgggggttcggtaatacatcaggtgcatctaatgactaaaccctgtaacctccctacgttttattattttaactattccgctttggtacaacaactacactcatgtatttgttaacttcacgaatgaatagatcaatagcaatgcaccctaaattaaaagcgtctttgggcatttttcggggtgcggcgataaactccatattgaccgcaggtgcattggcaagccactcagcttatgcctccagagagctgagagaacaaaacccaagattatattggcgtttacgttctatgggcgaactggacatattgtattttttaattaaagattcagtgtctggctatgtggaggccagcggtatgcaagagcagggacgagatgatgaatacaggaggataatagataatgtcatcaaccaactcaacggttaaaaaaatcttagtcggttttctatattatctttcttatatggcggcaaataccgttgctatgatcgcaatagtattgatggttacatcatttttctattttgaacattggtatgtcgccatattagcttgcgtgggtatttttgcggtttaccactttatattgtatttattcccgcaaagaccagattaataactacttcgcaatatgccccaacgccagaccccaatccactctacatcgccgtcggttagccctagcaactggcggcgttcatattttaccgtcggcccgttgcggctgattttatcccgcaggccgtagtgatggactctgacagatgtttggtacaatgtgcgcgcaatgctatgggcggtataaatatgattatctcagcctggttggagtgtcattaaaagtggatctgcatactaagaacgacaattccggggagaataacgccgccttctacgccaaaagagtcattaaaatcatattggagggcgtgataaatatagggtgcaaagcctactccaacggcgtcctttatatttttataaatcccctcatcgccacaatgactgaattgagaaaagaaaaactctcctgcatatgcatacccgcctttgaaggtccaatgatccttttcccaccagtcttttcgcacgcctagcaacatacatctgttggaaaaactattgactaacgttccaacagataaactgtaatctgactgggcatttaactttctctcaacggcaatatactgattatcaaagtattgcgtatagtcagttttgggttcatatgcatgaaatataaatgcccccggattcaccgagtaaagtttgtcatttgatgcgatagcactggctgaaatagcgatcaaatcggtggcgatagcagctctcattatttgtacctacatgtgttcgtgtcgtcacgctccgcgatggcttgtttgtcgaagcccaagcttgaaacggtgtacagttcgaacttaatcgtagcagcctgcttttgttccggcgttaatgatggatagataaacgatttcaatttttgcctgttaaccaaatagggattttttatttaaagagaacggtgatttacagttcgcctattcggtctgcttattcagataaagttgcccggctttctgatgttttccatgtggttaacaagatgccttcggccatcaatcaagaatgcgatgaacataatgatgagcttgttacctgaatttgctgaggtttttatgcacgccagagttgttacaacataggaatctgatttttgttgaaaaataccctcagcgttttatttacaccgcattgacttttcccgggctggtgttaacactttagtgatgcttatgaagtaaactcacttatttaaacgaatatcaaaatcaaaggtaaaaaatgaaatacatgacattagttttggctgtgaccgtcctgttttctgcttcatcctatgctgccaaacagatcactcgtcaagagtctgctggttatacaaaaataggggagctgtcctttaagcagtcaggtataccaaccgtaggtcataaagagctttcaaaaaaggttaatcaaaaatgtgaggaaatgggtaatgtgaaagccgataattgctattacttcattttggataaaaccggcaacgaatcaaaccatgaaaacgttgatgtcgaaattttcaaaaaataacgtttaaggctctccttagctctgcatcatattcatacctgatacagggtttgaattatgtcgaatgaagaacgtatccgtattgtgaggtgaggattggcatgataaagaacccggcattcttgttatcgctatccattggctttttatgttcagcacaggcctcagcaaaagttattgtcgaagaaggtctgagcctgtatagccatacggctatgatgactatgagtctacagctgcacgccttacggatattgcggctcggaatggcttgtgggtgaatgttttattggtgcagccccttggttccatggtcctggtgattttcacggccacgtagataaccggtttgatccccacaatggctatcatggcgcattccctaagcgcggagatgcacctttccatcacttcagagggaacgaggttcgcaatagccgtgttgaatatcgccgctcgtagcagaaaatcttttctcgggttatttatcgtacttttagcttaaggaaataccaatgaataaatttatcttttgtgtttttctctgcgcactttctggatgttccggcgatgatcgatcggaatggggcaaggcacccgctgagcctttggatgcgcaaacttgcatggatgatatcagcgatgccaatagcgattgcgcgcattctgtcgatccaaaattcaattaatatgaatgcgttcagataataattaattaaagagagacctgtgtctctcttagtctaccaaataaaatcaatctgcttttaattgtgtctgtgtcaatgccattgttgaagtcgtgcgtttatattcaattattgatttattcaggttaggaggggcagctttaggtattgatgcttactgggctattttcaggaatcaagtaagtataagggaaaaggcggtcatcgttctttctattaattttatcagtgatccctgatagttattttcgaaaacctgtcaggtatgggtaaataatcgggttatcttttctggtgaaaatttcttccccttaccaatcaatatactctcccaaatagccatgatgaagctactccgaatagggtgtaaatttcaacctttccttaatgatagaagagatcaatctggtcgcgaggaaactgtatctttcttgcggttttcgctttatcggaaaactcgaaaaagataaatattgtgatttcctgagtctcaataacgattgagcaacggtggttccgacaaacatatccttcttctgtgatgctctctgaacatgtcttattttagtgtcttggcgctgtgtattttctcaagaaccgaaaggggaattctatcgcttcagtggcagatagcagcgggcttcaagccattatctacgcaattattgctgccggcgaacgctagccaggggataatccagcgggaataacttggatgaaacttaacatattcgcaaatttgatgtgttttactgagaatccagatcgataggcaaaagtgacagtcatcagcgtatagcaatgaggttcaaggcattcaaagggacttgagctcactcgttgtaacctgtttctctctgggatttaaaacaaaaaacccttacacgaggtaagggttgccaaatggccaacaccagggaaagttaagatgattttattgattataaggctattgaatcatattaatgtgattcatgtcacgcatttattgataacttaaataaattcaatacattaatttgaagattaataattatacttaagtcaaattggctgtattcattatttaatttaatgtttatattgttttaatataaatagtaaatcatcgaaaatttgtcagatgccgcttattttcttcgcatcatccctgaaaaaatggttgggataggtcttatccttatcggcatctttaacgttctgagatgtcacaaaaaccccgatacaccgtgattcttgtgacaatcggtctttaaggtttgtcatcgtcagttaacgaagaatattatttagtgtttttattcaataggttatagggattgcaacaatgagggatacgagggtttatactctgtgggttgttttactttcttatcacctttcgccgagcgaagcagagtcatttatccccgccgctctcaactgaaagtggtattggccgattctccaaaagattgtgccaaagcggccatgacggacatcggcattattggcgtggtaaaaatttggtgtaatgccgaacgttgcattggttgcggtgcctgtgtgacgtactggattcctccctaaatttagcttcatgctgaaatgagggagggctccatttcatttttttagacttcatgttaagaaaatggattaaaaacgggcgcttaacccaatgttatacataaattgctcgccgctgctcaggccggtggtctgcgatatggaggcaaacgaggccacgttatccgtgagcggcacgttggcaccaagagtgagattcacccagttcttatcctgtctggcgctgtcgcggacaaaatgagtttgagttgatttcaggcccccaccgcttcgataaacgtcatccccaaactgatgttggtaattcacttcggcataagggttaaataaggaaaatttgccatccagccgccagcccaaagatccaatttgcgaatgataagtttgatcgctgaagcgcatggccgtactgtcgttaccattttcgctatatcccgacacattgctgtaatccagcgcaaattgcgccatcgggccagtggtcaggtaagtggtgatcggaatattatatccggtagtgaatctggctccccactgtttgccatcggtattaccggtttcagttcgggttaatgtgccgatctgcatactgcgacgtatatcatcgtaattcatgctggcgtagtgtacgtcggcattcatccaggcataatccgcgaattccagagcgctgaaggctgaaagcagcaaaccacgcgccttataatcgtaacggctggaaggccgttgattatcattcgatcccgcaattaatgcgccaatcagccaattttcggtcaactgataatctatacccaaggtcagattatgagtagtggcattgccatctccggcggcaatgttggctgaataatcataatgctgcccggcataaccgccaaatacgccaaatgagtcctgcggatttttatgagtgcgcaattgctggaaacggctgtccagggtagctcgagtgtcgcgagccatcgccgccgtggcttgtgtcagcgcagcggcttgcgcgggggcatcaagtaccgcttgcatataatcggctatcatctgatgcgcctgcgggcttgggtgaaaatgatcggagaaaaggtaggattggcccggggcaaagccagcctgacccgaagtacaaaccgctgaagaaacgcctatcgggcagggcattactgccgtattggtaaacccgaacagattcggattactaataatttcaccgaatagtttattcacatcgacgcggacaatattgccgctaccttgggcgagcaaagcgtcctcactattattataaaaatctgtgagttgcccggccagagcgctttgatcatcaaaggcagctatgagctgaacggcaatcccttgctgtacttgcggaatagagctgattcgttcagaggcggcggtgagtgcctgatgaatagcctgtctgcgggaggggttatcaggcgtagtcagggcatttagcgtgctgaaagcggcctgtagagcgccgggtattgctgaaggctgtacggcagccaatccctgttgaataaccagttccattaacattggggtagcgccgatattgggcacggtcggaacgataaccgtattggctccggcattgagtaaagcctgtacctgcgttgcggcagcggcagcgctgttatacgccacgctgggtgcgctggccgggtttgaggccgccgcagcggccaaatcgttaccgcctacccaatgcagatacaggccgttactgtcggcctgaccgttcactcgctgcaagtaactttgtacttgattctgcgtattgtaggcggggttgagtgctggcaccgcaacggcgccgccagcggcgtagttaaacccgcctttatccgacgcgactaatgtcatacctgcatttttcgccaaaatctcgtcgtataaataatgctggttgctatcgtaggtgaatctgccgttatttccggtatcactcagactgtcgccgaaaacataaacattgtcgtaagcgaatgtagggccagtggcgcaaaaaaataaagcaatggccagtgcatccatgcgatacggatacattattttgataggcatatatcaactcccttgaacctaaatatgaaagaggaaactcttgatggtcgttccggatgtaacaatcgctacctaaatattgtcggtttcctgatttagtcaaggcgaccggatatattcctgcctgcaggcccatgaatcaaaattgaattatggtcagtaagctgccacgaactgggttttggctacgctgaaaatataagcaggcataataaagggggaaactggcaaagtagaacaaacctcaatataatcgtttaattaattcactataaatatattaagggggattgctatgttgactcgtgaattgtttcttttttcacccgtcctcagtcatcgcaactgctcaagcgttaccggtatcgtgctgcgataaccagcttgagcgaagctaactgacaatctgaaaacttccctccggcttactgcattgcgagtgcgtccgacggctgaggcttcggtactgttccaaacagcgtttgcaagaatggcacgatctagcaccggtttacgatattttgaccgacaaacctgcgccagccgctacggctccggttgagacaaaactggaaagcattgcgcagcaggaaactgaagaagaatacttactggcgatgttgctgggtctggaaagcaaacttgaaggcgatctggcgcgtaaacccaagcatcaaaaaccagagttacagcgccagtggcagcatgaaattgtgcagttaagtagacagctaggtttggtttaaacggtaagatgagtattcaggccgtagaaatgcggcccgtttatcgggtatagaatttgagattaatagcatggcgcatttggttttattgaggtgataatcgctgaccagtaaatattatctttaaaccaataggaaaaaacactaaataaacagcctctgaaaataatctcttcgtatatcggaacaataaatatcagtaataacggatttatgattgaaatatacccacgatgtgaaacttgatccgtcatccacttttctgattttgttactcccagcagataaggtctaacgaactgaatggcaagtatgacgagcagcaatatcagaaaaaggcgataaaagatttccttttccaaagccgtcacgttttctaaagaaaaactaatatgaaggaacgataatgctgagctctaataggtacattatagggagcagcagcccttgtctcagcaattcctgactgtgtgcgatgaacaaagggatacaggtgatacccaacatcaagaagaacatcgagaagtagcctgaaactgccttggttttttcagtaaactcattatcggccatgcaatacccctatattctgttcgacgaatgagtctctacgcacttcacgtcacagtgtcttttgagttgaacgtagcctttgattgaaatccgatacgcataatccgaagagtcagatgcaggtggtttgtaaaatctgcctttcgttaggaaaggcagggagttctcttttaacgtctctttaattcccgcattttctgcctttagcggaaaacacggctacggtgccatgtaattgcacgtccacctgtttgaaatgtgtggagagcaccgagtgtaaattatctaacgaatcctgataattactaaaaattcctttttggttatagaccgacatcagtttgcgggcaaaggcattatgttccacaccttcaccaagaattgttgcaccacaaacaacaccatcgtcctttattgccgacgcggcgagtgcaatagcgggcgctttctctgacatattaccgggcaggcaatgaagcagataaaataaagaaaccgagtcgaactgattattcagatgctcaggtaacggttgaaaaacatcatgcaacacgcattctgaaatacgatgcagtccgacgcgatttttagacgcttcaagactgtttgggttgaggtccaacagagtaatattctgtgagcctcggggcgtattggccaggtaataaccggttccgacgccaatatccaagtgtttttttcccatgtgttgctgtaaatgaggtaataaaatatctttggtactgcaacgccaggcgtatttattcgatatgtttagtacccaccaatcatagagtttcagtgacagtggtgtataaacctgagcacctttagcgtttttggcattcatccgtaaatccttttcttatgtttttattcaacaatcaattgctaaaataaccaatttttatcttggaattcaatatacaggtgttaaatttccacattctcttattaggtagttagggggattaaaacaggataaagagggttgcattagatttatgaatggaaatcgggcggccttacttaaacgcgcttaggggaaatttgttaagggcgcacgcagatgcgataagggatacctgagttaattaaaccgcccctatcgataacgatgattcactagcgaacgcaccaattttccttacacttcaatcgcacttagatgttactctttattcagttaaagcgatgggagctggcaagtgaaaaagtcaccgtttacgctattagttgcactttgtgccgttagcgtatttttcttaatcggcgggtgtgagaaaagaaactcctattacttgatgcgataaagaatgacacccgagttcaaatattaaactgcgataaatattcggatgaaaacggtgatgcgccagccacgcaaaaatacagcgtagagaaaagcttattcgggcaaactcccttgatttccggcagtgaaattacctgcgaattaggtaaggatgtttcagaaaaacagctggcacgcgttatggcgatcgagaatggtgtgattaacggcattgactatacgcttttccattctgatgcctcagggagcgttgggcagaataacgctgaatggcaggtggtgtgtgaaaaagatgcaatgacagatgcacaaattgtgcagcgttgtgcagcgccgaaaaccacgatttatatctttataagaatgacttgggttatttggtttccgtggaaaaaccggctatagcaattcggggcctgatactcaggctcgacgccgaaaatccattgttcactaatactgaccagtttgatgcaaaacagtcgaggacaattatttctgctctgcgtaatggcacaaaattagtttatcgatttaaaaaacgcccaggtgatatctctgaggatgtttacgtcaacaccaataatattgagcaagcgttgctgttgctgaataaagcctatgctgctttgtgacgggcgagctaatcatttgattcgggccgtgtgaatacgcggccttttttatatggggtgtctgacatttatttactgagtgctaaacgaattaacgggtaaggtcgcccctgactgtctaattcagagtggccggtgatttggaaacccaaacgcggataaaaccttctgcccgcgtattttgcgcattcacgtcggtcgttattattgaatatagcgccacggcgtaatcaattattttacgaccaacgccgactccccgatatttcggatcgataaataaaacttccagctgaaattagttaaatagcataaatccgatagacccatcttggttatcgacccaagtaacaagggggcagcgggaagcagtgtagccgcgttttgccgttgaacgagagcttcaatctggtgcatgacaggcgctgccttttcccacttcacagttaaccattactgctcggtgcgctcatcatgctggaaaatgcgttagcccagcgatgcgtatttttcttgaaagtagacatcaggacttacccgcgacgctatgcgccaatgccgaacggctagcggtggctggttaggcgagtttattttttgttattttatgagcggctttagcgttatttccccgaatccatacattatacattcttctgaattcaggccgcttcccgctaaattatcttttgtgagcgaaggtgagtctgaatcaggtcgccccgcgttaagaattctactattttctctttttattgatgaaattcctatagtttttctatgaaaatcagcatttcgtatttcagactcgttgcaggttaatgtgcggtatcagccatttctttacttatcccaataattttgtacggatttttcgcaattcctttcgtagctgctattttattttttataaatcaataaattaaacttatttcgcaaagctaaaaaatgatggttttgggaggttcatcacaatgcgaacccgaagaagtgtgaagaatgtcaatctgaaaggtcaatgagagacgattaccccaaatagtggattactgccttatctggcaactccgtatactttcgacaaccagagacaatggatgtgggctaaggctcgcgatgacgtacagataaagggaattttaccattgcaactggcatatcaataacttgtgtcttttgaacatcaaaaggtgttgggtatggaaaagaaaaaaatttatctgttttgttctgccggtatgtccacctcgctgctggtatccaaaatgaaggcgcaagcggagaagtatgaagttccggtggtgattaacgcctatccggaagcgctggcatcagaaaaaggcccagaggccgatgtgatcttgttagggccacaaatcagctacatgttgggtgaaatcgaaaaaatgttcccgcacaaacccgttgaagttatcgacgcgcagctctacggcaaagtcgatggtttaggggtattaaaagctgccgtggccgctataaaaaaagcaaaacaataataggggattgtcgtgagccaatttattgcttctctggaaaaagtcatcttaccctttgccgttagaataggcagacaacagcatatcaacgccatcaagaatgggtttatcaggctgatgccgttaaccctgaccggggcgatgtttgttctgatcaacaacgtattcttaagtttcggcgacggctcgttcttctactcaatgggggtgcgtttagacgccgataccataaccatgctgaatggttggaaaggcattggcggtaacgtttataacggtacccttggtatcatgtcgttaatgacgccgttctttatcagtatggcgctggccgaagagaaaaaggtcgatcctctggccgctgcgctgctggcggttgcagcctttatgaccgttacgccgtacagcgtgggtgaagcctatgccgttggcgcaaactggctgggcggtgccaatatcatttccggtattattatcgggctggtggtagctgaactctttacctttatcattcgtcgtaactgggttatcagcctgccagacagcgtgcctacctcggtttcgcgctcattctctgcagttattcctggttttatcatcctgtctatcatgggtgtgattgcatatttcctcgcccaatatggcaccaacttccatcaggtgattatcgatagtatctcggcgccgctgtctaaaatgggcaatgtagtcggctgggtgtacgtcatgttctcctccctgctgtggttcttcggggtgcacggcgccatggcgctgtccgcgctggaaagcggcattatgatgccgttcgcactggaaaacgttgcaacctatacccaatacggttcggtagatgccgcgctggctgcgggtaaagagttccatatgtgggccaaacctttcgtcgattcctacattttcctcggcggaaccggtgcgactctgggtctgattattgccatttttattgcttcccgtcgtgaagattaccgccaggttgcgaaactggcagctccagcaagtattttccagatcaatgaaccaatcttgttcggtctgccggtcattatgaacccactgctgtttatcccgttcatcatgattcagccgatattggcgattattacttccgtggcttattacagcggttttatcccgccaatcaccaacattgcgccatggacaatgcctgccggtttaggtgccttcttcaataccaacggcagcattgcggcgttactgctcagtttgtttaacctgggggtagcgacattggtttatctgccgttcgtgattattgctaacaaggcgcagggcgagattgaccgtgaagttgaaagcgaagaagaaatcgcaaacagcctgaaattctaataattacactttgtttgagctgcactctgtttatgacgtaaaggtttgggagctggaatgaaatatcaattttccgatgatttttggtggggaagtgccacctcggcaacgcagtccgaaggggcggcgttacgggagggtaaaagcaagaatatcttcgattactggtatgagatttccccggagcgttttcatgacttagttggtccagaaaatacttcgacattttacgataactataagcaggatattttgttgttaaaggcgctggggcataacacgttcagaacgtctatttcctggtcccgattgatccccgacggtgacggcgagctgaatcctcaggccgtcgccttttataacggggtgatagatactttactggcaaacggcattaagccttttattaacctctaccactttgacatgccgttatgcctgcaagagcgaggggggtgggaaaaccgagtcgtagtggaggcttatgcccgttatgccgaagcctgttttaagttgtttggcgatagagttaaacactggtttaccttcaatgagcctattgtgccggttgaagccggttatctgaatgacttgcattacccttgcgtggtggattttaagcgagcggtgacggtggcttaccatagcgtattggctcatgccaaagcggtggggcgctaccgcagcgcggagcaaaacgggacaattggcatcattttgaatctgagcccgacttatccgcgttcagatagcgccgaagatcgtgcggcggcgtatcatgccgatctgttgcttaatcgcagtttcctcgatccagtaacgaaaggcgcttatcctgctgatttggtggaattattacgccagcatgatttattgcctcgcactgagccggaagacgctcagctgattgcctgtggaacggtggatgtgcttggggtgaattattaccagccgaggcgtatccaggctaaagacgttccggtttctgccgggcaggtaaaaaccccagaagatttatttagtttttatgcgatgccgggtcgtaagattaatccccatcgcggctgggaaatttatgaaaaagggctgtatgacattctgaaagacctacaggaaaattacggcaatattccctgctatatttcagagaatggaatgggcgtggagggcgaggagcagtttatggactcgaccggaatgattaatgatgactaccgaattgattttattcgcgaacatttaacctggctgcataaagctctacaggaaggtagcaattgtaaaggctaccatttgtggacctttatcgactgttggtcgtggcttaatgcctataagaatcgttatggattggttcggctgaatagggcagaccaaacccgtgaactgaaaaaaagtggttattggtttgcaaatgtcgcaaggcaaaacggctttaactgacggagtaatatcatgtttgatttagattctatcgttgataatgaagaaaccagcagtgagttggaagacgtcgttatggggctgattatcaacgcgggtcaggcgcgcagcctggcttacaaagcgttaaagctggctaaaaccggtgactttgctcaggctgaagaaatgatggctcagtcccgattggcacttaatgaggcgcatttggtgcagacccaactgattgaagcagatcagggcgaagggaaaaccaaagtcacgctcgtactggttcacgctcaggatcatttaatgaatgctatgctggccagagagttaattgccgaattgatcgaattacaccaacgagttggttgatgttgatgttggcactttgtccgttttgaatattaaaatgacggtgaataaaatggatataagattagtacgtgaaaaagatctttttaacgacaaggaattccatctatttatttacaataaaacggaaagtgccacaggtttacatcggcatgattattatgaatatacgctgatattgacgggaatgtgttatcaggaaattaacggtaaacgggtgtttttagagcgcggagacgtggtttttatccccgtagggtctcaccatcaaagtttttatgagtttggcgtgactcgcattctcaacgttggtatcagcaaagcgtttttcgagcagcattataaacatattttatcccgcagttttgtggcttctcaggcctatcgtattaaaggcgattttctttcctatatcgaatcagcgatttctgcggctcacgtacaggaagatgaaataacggagttgttggaattactgacattctatgtcacaaaccgcattagccattataaagagaccgctcccagcgatgatattccccagtggctaaaaaataccgttgataagatgcatgataattcgcagtttggggaaagggcgctgatcaatatggtcgaactttctggcaaaactcaggaatatctcactcgcgcgacccgacgttattaccaaaaaacgcccatgcaaattatcaatgaaattagaatcaattttgccaaaacccagcttgaagtgactaatgacttggtttccgatatcgcttttgaagcgggttacagcgacaccacattatttatcaaaaacttcaagaagctcacctcttttacgccgggtaactatcgtaagaaattctatggcgttgctgagagtttatcccactaatttttggctgacgctggcgacagcgggctacgcagaaaggtattactcatggggaagttacttattattaatgctgatgatttcgggctaagcaaagggcagagctacggtattatcgaagcttttcgccacggagtcgtttcttctaccacggcaatggtgaacggcacagcaattgatcacgctgcggaattgagtcgggaaaatcctgatttaccggtggggttacattttgtcctcacttacggccgcccactcactgagatgccttctttagttgatgccaagggcgaactgaataaatctctgtggcagcacgcggaggccggcacgttgaatctggatgaaattgccggagagctagttagccaatttgataagttcgttgctctatttggccgcccgccaagccatatcgacagccatcatcacgttcatatgttgccgcagatttatccacgggttgccgcttttgcccgcgagcgaaatctatcgctgcgtattgaccgtcattatgcgcagcagcaaaaaatcgcgttgggtgattctcgcagcagccagtggtttgaggacggtttctatggtgaggaaatatcggaacagctatttttacaattgttggataaagccaatgagagaggcgtgaattccgttgagtttatgtgtcatccggcctttatagataaaatcctaatgaccagtagctattgttatccgcgtttaactgaattagaagtattaacctctcccacactaaaacaagccattgcgcagcgcggttaccgattaggttcttttcaggattgctaacgttcgcctatttatctgataaacatcctagtaaaacggcccaaccagggccgtttagttgagaataaataactctcaaaggcttcctggtacttcagatgttcttattcattatgcttcagctgcgactcactttattgagtaatttatggcaaccgcttttttccattttaatgatatgggtagcatcggtggtggcatcttcatagcttttacgtaattcctccagatcacagccactcggatgattgccattgctggaagaaacttgaaagggaagtatattctggttgcttaacatggttgctcccgtgttgacactcaggacgcacagcagaggcaatatgatgaattttgaatttctcaacattgatcttccctacggagtttcttaatcatgggtctcagaccatactctctgaagattgtattagtgagagtaaaggtaaatatgattaagctgagggtaataaattatagatttttcctctgaaacggcttaattattgacaatataagatatagtcaagtgcgtgactttctccgcgggcacagatacatgctctagcgctaaaagcattgtgctataaagtatccgatgccagataataggaatatttctatggcaaatagcagaatcatcaggatattgatgttcgccgtagccattttgaatcgttcaaaaaaaatactatacatggtgatgaatctttaaattggaaacgctattaatcttgctaagcataagcttatcctgatagacgcagcgtctatcgctaccgatttcagacgtgatatttccttcggcataaacttgtttcagcaacgctgggtaggccgtaatcagccgcgatgtatttaacatggctgaaagtctggacgatagctctctggcgatattgattgccggatgaactgcttctgaattttgctgcgtgagttccgctaatcctccgcgtaaaaaccagtagtgaagttcggtgctattacgaaatttaagcttagccattgccgtacgtttatgattgctcacggttttaacactaatacgtaacatattggctatactgcaatttgtcatgcccagcgctaatgactctaagacttcgcgctcgcggcgggtcaatgcttccgtaatgggtttaatgccgataagagcattccgggactgtattgaggaaaacattggctttatcaaattcactaatttatcaactgataaattacgtgaaatgactctaatattttcctgattgatagtgagtgagtgatgattaacgctatccggattttggatcaaaaagaaccgagtgttagaggtctccgggttagcggcaatctccgataataatcctgactctgatagtgaacttccacaaaaaatgatgttggcacgataacggtagtaaatgtcgttagtaaaaaatacacgtatatttaatcgggagaaaaaaacaataagcacctgacgtaaaccttccgcatagtacttatctttctcgataatcaatattgtcagggagttattcccagaaaatcgattgtttctcgtggcgtgattattaatgacgctggattccatgcgtagtctatcctatgtggcaataatatttattattatttttctgaaggttgtatttattttattttctgctgtaaaacaaaaatatcaaatatcgctcaaataagtttaatttttcaatcgtcagtcatcatatttcaattatgttctcatttcttttcaatcattattgatctctcgagtgcggctattatgagctgtcatgggttttattataaatcttcatttttcatagggaaaagcaagaaaccttttataaatccttaagttatttaggaaagtccactcgaatatgaaacataatattaaaggaatttttattccactaacatcgcgctttgcgatgccggttgcttggttaaatattgtcatacagattctttttcctctggcgggtgcatttacgccagtcatggctgcaaaagcagataatcgctcgatgctaaccccgccctcggagaaaaatgtaatacctttaactaaggtatatacgttagctaagggggaaactccatcaagcgtggcaaaaaagtatggtattagcctggatgagttacgccagctaaaccgccatcgactctttttacaggagtttgataaattgcctgaaggaacattgttgaatgtgccgaataaaattccggcaaaaacaactgaaaccaatataggagagttgaataaacaacagattgaaaaggaaaataaatttgccagttgggcttcgcaatctggccgctttcttcaaaataatcctaatggcgatgcagcggcaaatcttgcgttaggtgcagcaaccagcaaagctaaccaagaagtgcagcaatggttaagtcgttttggtaccgcgcgcgtacagctaaatctggataaaagtttttctttgcaaaactcacagattgatttgcttattccactaaaagatcgaaaagacacgctgtggtttagtcagagtagtttgcatcgtactgatagccggactcaggccaatttggggctgggaattcgctattttcagcctagctacatggtgggtacaaatagctttctggattatgacttatcccgcgatcatgctcgcttaggctggggggtggaatattggcgcgatttcctaaagttaggtgccaatacgtattggcgcctaactaactggaaagattctaaagattttgtcgattacgaagaacgtccggcaaacggttgggatatacgcgccgaaggatatttacctgcttacccgcagctgggcgctaaattaacctatgaacaatattacggcgatgaggtcggattatttggcaaagataaacgccagagcaaccctcatgctattaccgctggcgttaattacacgccgtttcctttattaacccttagcacggaacaacgtcagggtaaatccggcgaaaatgatacccgatttggaatccaactaacctatcagccaggaataccctggagtcagcaattggacggcgcggcagtggccgttcgtcgtagtctggctggaagccgctatgaccttattgaacgtaacaataatattgttctggaatatcgcaaaaaagacgtggtgttcctcacgttgactaataacgccagcggctatgccggtgaacaaaaatcactgggcgtatccgtgaatgcaaaatacggattggatcgtattgaatgggacagcgccgcgctggtgatgaacggcggcagccttgttcaagaggccgccgatagattcagcgtgatattaccgaattatcaacccggtggacgcgccgcgaatacctataatttaagcgccgttgcttacgataaaaaaggaaacgcttcatcccgcgcgcaaactgagattgtggtgacggaagccgccgtcagcaccttaaacagcacctttagtccagcagaaagtcagctaactgccgatgggcagcagactgtcgatctcgtgttgaatattcgcgataaagataatcagccagttgatgtgcaagatactgagatcaatctggatattagcagtcaggcgagaagtaaagtcagcactcaggttacgccatttactcgcgtggatgtggggcaatatcgcgcaacggtgacggcaggaactcaaaccgagcgagtcatcttaacgccttcgacgcgcaatataacattggctgaggccaaggttacgctggtggccggggatgcggatatcggacattccactttgacggtatcacctgaaacaattgtggctgacggttctactcacagcacgctgacctttaccgctaaagatagccatgacaatttggttagcggcttaaccgatgtgagttttgctatcagtgggctgaatgataatagcagcctggtggtaggcaaagtggcagagagccacggggtttatcgcgcaacattgcagggaaccgaagcgggcgcggccagtttgacaccggtcattaacggtgtggcgctcggtggattggcggcgttgctcacacttaccgccgataacggaacggcgcagattaccgatggcaatttgtgggtgacctccgacggcgcgttggcaaatgatattgaaaccaatggtgttagcgtcagagttaccgatgcatcgggtaatgtagtaccaaatcacgaggtcacgtttagcaccagtaacgggcagatccttacgccgcatgtcataactgatgtgaatggattggcatcgacgctgctgaccagcactctctctgggactattcctgtcaccgcgacggtcaacgggcaatcgaaatctgtcgatacccagtttgtcggtgatctatcgacctcttttattaccgaccttacgccatcggtgacgcaggccgtggctgatggcagcacgaaggtgatatatcgagcgacggtaaaagatgaaaaggggaatactttacctaacgtaccggtgtattgggagcgcgacaatactcaggttatgttgagtgccgctcgcagtgaaaccgatgatcagggcatcgcgcaaattgaggcttccagtctgaaagcgggggaggtgattgtcagtgctcaaagtcggctttctcgtaaatcggcaacctcggtttcctttatcgccgatatgactcaggccaagatcgatcggcttagcgcggataaaaatatcttagtggcagataatacggaaaccgccaccttgacggtcggcatcactgacaagaatgacaatattctgactggtgtaccggtgagctggcagattattgaaggcagcggcacgatcattcccgttgagtcagttaccgatacgcaagggctggcgaccgcctctctaaatacccgtcagtctggcgtattaaaagcgagcgtaagtctgaataatggtgattcgcgcaatattacgctgaatgctgtggccgataaccgcacggcaaaagtgttattgacggcggaaaataacaaagactcggccattgcgaatgacgtcgattctgttgtgctgcttgccgaggttaaagatgccgaaggtaacgccattattgatttgccagtcacctggcgcagttcgattaattcagtaaatcaatccgtgtccaacaccgatatcacgggtgttgcgcggatgacgctaaaaggcaaccaggccggagatgcgcaggtaacggcgctactgttcaatggcgaacaggcggataaaagcgtcaggtttgaccctacagcggcagaaattgggaacagccaattgagcacatcgccacaaactatcgttgcagatggcgttgccaagtcgctggccacattgatattgcgtgataccaacggtaatccggtatcggggcaaagtgtgagattcagcgcggaaaacggttccgatatttctttcgtcaatcaactcgaaaaaggtcagggtgtttatcaggtcgaggtgataggaacgcgtcagggaacgcatactttaacggctcatatcgatggagcaaatccatttaacaagagtattgatctggggctggttgccaatgcttcagatgtacggattaagtcggtaaccgttgctcgttcgcaggccaatgctgacggcaacgattcagtggaaataacggctcaggttgaagacagccaccaaaataccgcgctggaaaacgtggcggtaggctggaaaaccaatctgggagaattaatacggccggttagccagactaataaacaaggggttgcagtgatttcgctgaccagtaccgaagccggaaatgcgcaaattgccgggctattaggttacggtcaggaagaaaatgccgacaaactggttacatttgtgaccggaatggtatccgatgacaaatcaaccttctcgttgtcaccgacggtcattactgccaatggtaacgatagcgccacgctgctggtgactgcgcgggatgctcaggggaatttgttaactggattgcagaaagagatcgtgctttcttctccggagggcatcaccttaaagacctcggcatttactgaggtttccaccggaatttatgaaggaaaaatcagcgggactaaagcaggggttgccaccctaaacgttgcgatcaaaggggttacccttaagcagcagcgccaattaacgctacgggcggatgcggctacggcgaagatgttgggtagcgcaacggcgaccccagcgtccgctatggtgggcgagtcggttatttatcgggcgactttagtcgatgcctatgataacccgctgggggcgggtattccggtgacctggcgtgctaacgccgacagctacttgagccagcagcaaaccctgactaatgcccaagggataaccgaggtgtcgctcagtcgcaccaaggtgggtacggcgcaactgagcctaatattgaccggtggaacctttgatgcgccgaatgtgcctttccacgcaggcgcggttgatgaaagtaaatccgagttgtctctcagtccgggcagcattaccgccgatggcgtagatattgcgacgctgaaggtgatactgcgtgataaacaaggcaatttgctgtcactgcaaaaagtatcggcggaggcggatcagaaagacgcggtgacgatctctgcggctaaggaaaattcaccaggtgaatatctgatcctggttcagggaaaaaaggcgaccaccgtcagtttatccactcaggtcaatgacgctccgttcaaaactgcgcagacgctaacgcttaaggctgatatttccagtggaaaggtcgatagtattacgccggccgtcaccagcattgttgcagggaaggacagcgtcgtttatcgcgcggtgattagcgatgctgagggtaatttactgaaggacgctattgtgtcctggcaattaatctcaggttcggcggtctttgatcgaatatccagaacggatgggatgggagtagcacaaactaccttgagcagcaccgtagcgggtgacgtggttattgcagcttatctgaacagtaaccaatataagaatgctataccggtaacggtgaaacccggcgccatcgatcaaaacgcgtcgacctttgtcagtgacaaaatcacaataggctcggatggaaccgaagcggccaatttgctggttaagctgaaggatatttacgggaataatattcctaaagaggtggttaatattacctcatcttctacattgaccggttttaaggtgacgcctcagccaatgaaggatataggcagcggtaattacaccgcggctgctacctctaccgccaaaggtcagcaggtgatcagtgccaaagtgggcagcacccaaattggcaaagatattacgattaccatcggggcaataacgccggatttgcgttttgataatgcgcagcagcaagtgacctatgtcaaaacctttaaccaatcgcagccggccagaaatgttcccgtcggcgtgcgccaattttggagcagtagcgatcctgatgtggcgcaggtagatgacgttggcaaagtgaccctatataaatcgggcaaggtcactatcacgattcaaaccagcggtaatgggcaatataacccggctcagggcagctatgaacttcaggtagataaagccgatcctcagctcacgacggatcaggcaattattgccgattactgggcggaaggtaacaatccatcggtgaaggtttcactcaataatagtgatgctgccgccttaaccccaacttatcgaagtagcgatagcaaagtagtgaccatcaatgctcaaggtaatctgacgcaagtcagacccggagcgactgatattaccgtttcaacgccggaaaccgatcaattcaaagggagtgaattaaagattggctataccttaagtaaagggcggcatcctattaccttcagccaaccgactttccaggtaacggatcaggagaatctgtcggtagagcagcctattgtggcactacccgctaatgctaaatatagttggggaagcagcgatagttccgtcgttaatattaaacctactactggggagataaatagtcaggctgtcggcaaggctcggttgacgttaaccatggcatcgaatgaattctacgaggaaagtagcggctattacgatgtggagatctacggaaaaccgagtattagcggcaaggtagttcacctgagtaaaggtcagtcatctgaatcgaataaatggaatccgacgtttacccgcgatacgatatcggtgaactggtcatccgagagcagtaataaatacacggcgccaacgaaggtggtaattcagatatttgataacagtaccaacgctaagcttgaagaaataacggaaacttccagctttatgtcgaaaacaacgaccttccaacccaaagaaagctattggggaaaaaggctaaggattgttgccacggcatacgggtttaataatctgcaggatcgctaccagtatatggttgacgcgtaccccttagagccggccgctatttggaatagtgctattctaagatcgcgtagccttatttatatcactagctcaggggcaagagattcatcatgtcgggagacatggttgggtcgggagcatcatgttaacgcgaacattgataatttggccttaaactttagttcaggggatagattaatcgcaccgatggaagtgacggtaagagtcgactttggcggtcagtccaattcgaatgtttatacaaaaaccaatattttctccagtgagaatattgccgttaataaaagcaccaaaattttcagcgagtgctggaaaagccacgttgggggttactcaccatcattagttgtcaagttcggtgggatgacaagaacttactggggcgggtctcatggctggggggggaaatggtgacggcaacgatacgccgcgtgtggataattactaatgctaaaaatatgactatggggtagtcattttagataagtaggacagggacgttatttacaatcctcaccgcgacactcagtttcggtgagggttattttgacaataacaggtaatgattttcacagtaaaaatgatatcaaaagatcagaaatgtcctacgattagttattttaaccatgatgtgatgtcgcaggccgaccgcggtgatcatttttctcagagagagagtcagttactgagtatttctaatataggagacagttttattcaggacagagtgatgtacagcgaagatgtgttggatttaaatccggcgtcgaataaaagaatattggcaggaagtaaaactaaagcagagtctagctgtagagtaaaattacagacattaaaaaaaataaccatttatttaatcgagtgtaatgaagaaggtttttatttgttgaatcagcgctctgccttatctgaaaatcctgtcggcattaataataaacaggagattaaatatagcctttgtaacaatgattcttttcctgcgcgtaaagataaattaggccaggggattttgtagtaaaagtcagggggaataatgttccccattatgttaataacagcaaatcaatcaagaaaaaggaatgaaatatgcatttaagaaatcactcattcagatcctcttgtcgtcattatattaaaaatgcagaagtaactaaaaaggcatcagaagtttctataaatatagggagagttaattctggttattttgctagtttattcggtgtaagcaataccaatgttaatattagttggaaaggaaattccacgtcattagatctgaataaggtagttaaaaattgttggaagacaataaaaaataataataaagatatggaagaatggcggcggcaggagagaagcgtatatatccctgctgccattaataaatcaatcgacactgctgctggatatttaggtgccaaggtaagcacggagacgaaggatcgtgtttttgatagaacattccaatataggtatatgtctgccgagttttctggtgtgagtaacgtaaagagcgcagctcagacttctattggacaaacggtagggaactatcttagtcggaataattctctagacaatttatttaaaaataatgaattgggaagagatgccagccagccagatatgaaaagaaaaatcagagaagagcattctttagtcagtgcggaagtaacaaatttcatctcagaccagatctataaaaaatatttctcacaggatgtcagtgcgataagaaaagttgcattgcaattaacacttgaggaaacagggatgtttaaggctaaaaaaatcatgccgccgcgggtgtaaattctaagtaaacaaccaacccacatataagtgatattgccagtaaagccatatcttgggtaatgaccgaaaaaataaagcgtgattaaaatatgcaatatatgatcgaactttaaattcacgtgaactaaaagtgaattctcgctttatgatatatagaaggaacaataatgaagattaacaattcaagcacgttggtgatcaaccctactagggtaaatgaaaatagtcagactgaaagtgagagttctcgtctcaaaaaaaatgtcgcaacaaccacggcagtcagtaatacgacatctacattaaaagcaaaaataaacagatataaagctcaaagagatgaagcgaataagacattcacacctaaagaacagcgtgtaaaggagttttatggttcaaagtttactgtgactcaagaaggcgggttactcaccacctctaaaccttatcctaaggaagtacactccttattacataccgatgctaatatatccggagctaaaacggctgccacgatgagggctttaattgccgaggggaatatgcttgcggccaaaaagtcgcacatgcctgatgccaatattgacttggctaaagcgatacaaaacactttgttcgaggcagccgcaaacaatttatcagcgctcactgcacctatttccttacatatagataaagagcagggcatttcactcaataatgctaaaagagaatcggttaatgagtgggtggcaaggaatgataatagtgaaacctttatcatcttaaatggaaataatgatgaaacctacgtcaatttcattgctgagacgctgaaggattcaaagaatatcaatttcattaccagtggatttggcggacatggaacaacggatcggcacaatattgcgataaacaaaaccgaaggcgatcgcttcaaggaaattttggtcgggaaagggatttcggctagccgggtaaccgtcgatcctttctctactaacagtggccaaaacgctacgaatgtcgcagatattctagatcgtgtcgctgattcaggtaaacctgtatcaaccgtcgtggtcagcggtacgccagctgcagtacccaggcagactcttacctacggacaacagctgaagttagataatacaaagagtttcaatatagaatcattcccattctttaatccaagtgaatataacactttggccgatagcctagcgacaatcagagagttttcaacaacgcttaattatctgttcaacacgtcatatttgcctgccaaacccgagctgtattccgatgattttttctctgcggctaaagcatgttttagcacattggaatcgaaattgggtagtgaacattcagagttcgcccaacagaataaacctctattagaggcaatgaggaatgtggacgatgccatgatagagagattccgcagccaaagtttgactgaaaatgataaggcggcggtaaaaacaatagataatttcttcagatctttgttcaatcctcttgaactgacctttaagcgtgataatagctagtcaataccaatgtgccctctttggggggcacattcaatagtttttggagggggcgtcatttgcagcgatatgggattttttatcaggtcatgcagattatctaacgggtacgaagactagaagggcgggtttccttttcggtaaacgtcccaaacttttttcgcatatttcatccgcatttcatgacgatcttttcctgttcctgaattatatgccccgacggcttcccagctataaccatagatcttcatcatatcggatagtattgaggcaccgaccaatatggaaacacagggatctgaggtcaacattgcatcatctacgcctattttgcgcagtcggggaatatggctgctgtttatttgcattaatcctaaatcgtaacttccgttattattttttcctacggcttctggtttcaatccagattctacctgagcgatagaatagagcagcttggcctcaatgccgaaaaattgttctgaataggtccagcagttggcgtaaccttgataagggaaaaaaaagctcaggataaaaataattatcctcgataaagtcacgctattcattaatttattttccctggtggaatggaacgattcttgtgataagtggggttgtaagaatattatcagtaaatatatcatcatgaaatgataataactggttatgtataacaagctggttttttggaacaaaagtgacatccggtggattagtaatattaatattaaacataatcataatttgtattgatcttccatttttgttttttgatttcatttgtaattcattgtatttattggtttttatttataatgcttgatttttaatcttatcagatagggttaggatatttattaaataacgctaaatcaatgggtgattgtttgtcactggtacaatctgttctacatcatgaattgatggggaacggtaacaatctttcctagataattaaatttcctctcgttaatactaacgttatcgatatactcttacgcagtgtctcgtcattttctcatcatgtttttactgaatcaaagacatatattgagccaagagatcatgacgctccctataaagaatataatagatatatctttaatcgaatatgtcggaatgtttctgaaacgaatggtaactaacttatggataggcttagtactcatctatatctacaacaaaatgatcggttagagtttcaaaagccgcagctgttgctgactgaacctcataaaagcaccggtgttgattttaaattgatcggtgagaacggcagcgatgttacctgccagtttaagccgggtgaaacgggtatcgcggcttttttaccaatgtcattgcatattatcgaagggagtatgcgctatcggtcattggatctcattgccctgtgcaagctacaggcatttatagatacttcgcttaatcgcgtaggttttgaacgtaacaatgatatttgctgggggtttgaacccctagggtttcaagagaatgtgacttttaaacatattgagtattggttaatccgtcaatcgttacgggcagactccggaacggggaatatcgccagcatcttacgttctaccgaatggtatcgcttagtcagatttttactacaggaagcggatagcaccgaacgtttgcaggatttgggcgcacgctatggcgtttctgtgtctcattttcgccgcctgacgcgtaaggctttgggtaatacaaccaaagtagaaatgtgcgattggcggctagttcgggcgttattagatctgatgggagaacagaaaagtttgactacgttggcgatgaagcatggttattcgtctctttctcatttttctaacgacgtcaaaatatcattaggtgtttctccacgtagcctgaaagatgtcattatcagcgatgctaaaaaatgaattatgttattggttttaaaagaacctgcgtctgtattttaggggtggttgtactagcaggcatgcctgaaaaggcattttctgaggaaaattcatcaagtctttcgggctatgtagcacggcaaaatgatataaaagggctgattgacgctttgtcatcaagaatgaataagccaattattatcagcaaagccgtggcgcgaaagaagattagcggggagtttgatcttaataatcctcagcgtttaattgacaacatttcggcgcagttagggctgatttggtatcacgatgggcaggctatttatatttacgatgcatcagagatgcgcaatgccgtggtggtattaagaaacacctctttttcagcggtgagcaattttttgcgtaaatctggtctatatgatcagcgttacccattgcgctcagatagcgtgagttccacgttttatgtatctgggcccccgatctatgttgaattggtgacaaatacagccaaattcttagatgaaaagaacaacgatttggatggacgctcaaaagttgcgtctatcccgttgtttaatacgtttgttcaggatcgtgattttaaatatcgtgacgataggatcattattccgggagccgctagcattgttcagcaattacttaacggtaatgaatccggtggggatgttatggtgccagcaccggcgacagatactattgccacggatttacctcctcggctggatgaatttcccggtgtcagtcaggcaaaacccaaattaccttttgcagatttgactacggcaataagggggcgtccttcagcctcgggttttcagattgtggctaatccgggaaccaatagtctattggttaaaggaagcgctgagcaagtctcatacgtgcaaaatattgtcagtgttctggatttgcccaagcgccatattgagctatcggtgtggattgtcgatttgcaaaaagatgcgctggaacaaatgggcgttgaatggaatggtggcgtgaatgttggggggaaactagggatttcttttaacggtggagcatccagtactgtagatggcgcaacatttatggcctcagtgctggcattaagccaaaagaaccaggcgaatatagtttcccgtccgatggtattaacacaggagaatattcctgccatttttgataacagccggacgttttatactcaattgatcggtgagcgtagcgttgaattacagcatattacctatggtacttcggttaacgtattaccgcgttttaccgatggtaacgaaattgaaatgatgctgaacgtagaagatgggtcgcaggttcctgtctcttcagacactccaaatggtttaccggaagttggacgcaccaatatcagtactattgccagggtgcccagagggaaaagcttgttaattggcggttatacgcgagatgaaagtaccgatggggaggccaaagttccactattgggagatattcctctaataggcgggttatttagatataaaaaatcgcgcaactctaatacggtacgggttttcctgattcagccgcgagagattgaatctccgttacaaccggatgccagtaatcttattgccgatatgcaaaaaaatctggccaatcctgcgttgcaagactggatgcgaaattatgtggatagccagaaatggctatagatattggcaagttttcctcttcatcactcgatttgtaccagttacgtcgggataaggtgagcagtgaaaaaagtgctaatacgcaaaaagctgcccaagaaggggctgtgaatagtgacgaaacgcagaatattgcagatgattcaccagccgccgcggtgcagcgttttggcgactctattgatgaaatgtcaattctattatcgcaatttcgcaatcgtcgagattatgaaaaaaagattggtagtgcgagtgaaagcagctttgaacaaattttggacgaggacgtactgcctaaagtctatgcattattaaaagtcacgtcgagtgtcgatggttcaaatataaagaatctattgcaacaggtgcgctcattatttcctgatgacagcgatctggttttggtgctgcgcgaactgctacgtcgccgcaatattgatgaggtagttagacgccgccttaaaatcatgttgcagcaggttgaaaagcaggctaatccgcgccggcttaaagctggaataaatgtggcgtttaaggcccgcttatttgggaaggcactgcagcttgatccggcactcatgcgcgagagttaccgtgattttttagagagtgatgcccatgaggtcgaagtttatcaagattggatttcgacatatggcgctaagcatcgtgccgcggtggtcgattttatggaaagttcgctgcttagcgatatggatgcccaggatccaagttgttctcatattgaatttggtaatttattagggcggttaggacaggtaaaactgattcgttcaagcgacagtgcctttatagataacgtattgaaaaatgccttaatacgggcgcataacgattcggaacaagcttggttgttatttatgctatgcgtattacagcatccggaacatataaaagattatttacaagaagcgattggtgagagaataaaattaagtaaacacgcggaacgttcctcgttactacatattatctcgcaagcctgtaaaaatttacccagagaattattttatgaacctgaagatgccgatgtattagcgcgggaattcgagagattggcaacaatagcctatcgctacgagttaattgagcttcgtcggggcaatttagagtaaacgaaaaaattacccggctcgcacactgactctattgttaaaccaccgcccgttattatgaattcgagcatgtcgggttgtgcctgaaattgcagtagaccttttactgttaatttcttattgcgtatatgatttataactctgttggcatcaataatggaacctgattttgattactgaatttcttattaaaactagacggcatccagagttatttattctactgctggttattgtcattattgccatgttggttataccactgccgacttatctggtcgattttctcattggcctgaatattgttatttctgcattggttttcctgtcgtctttttatattgacagaatattgagtttttcgacctttccagccgtactgctgataaccacgctgtttaggttggctctatctattagcaccagtcgattgatacttaatgatgctgatgcaggcgatattattgcgacattcggccagttcgttattggcgataatctgatcgttggctttgttattttctctattgtgaccatagtgcagtttatggtcattaccaaaggcgcagaacgcgttgcggaagttgccgctcgtttttctctggatggaatgcctggtaaacagatggggattgatgccgatctccgggcgggttctattgatgcagatgcagcaaaagagcgccgcagcgtggttgaaagagaaagccagctctacggttcttttgatggcgcgatgaaatttattaaaggtgatgctatcgctggcattatcgtcattttcatcaactttattggcggtatgggcgtgggcattagccagcatggcatggatatgtccacagcgctggcgacatacaccatgctgactattggtgatggattagtggctcaaattccatctctgctgattgctatcagcgccggttttattgtcaccagagtcaacggcgatggcgataatatgggccagaccatgatggaccagttattaggcaacccatttgtgttgctgattgctgccatgctggcgctaggaattggcagtttaccgggtttcccgttctttatttttgctattctcgccgcaggactcagtggattattctatttcaaatggagtgagaaaaagcgccatgcagctaaaaagaatgctccggcagaaatagcttcaggagaaaagaatatcgatgccgaagggacatctctggggctaattggtgatctggatagcgtggcggcagaaacagtgcctttaatcctattggttccgacagcgcaactggccgcattacagaaagccagcgtggtggagcgttatcggagtcaattctttatcgattacggcattcatttgcctgaaatgatgttgaaggcatcggataatcttagtgctaataccgtcgccatcttaataaatgaaataaaagcggacgaatttaatatttactttggcctgctgcgtatcgtcaacagtaccgatgagctaaagcagttaggtgttgaatgcgttacccataataaagaaagttggaccgatagcactaatcaggcatcgcttacacagctaggctatcagcttagaccggcaattgatgagctctattactgtctgtcagtttctctggttcgccacgttaatgagtattttggcgtacaggaaaccaaagatttattagataagttagataataaatatcctgacctgatgaaagaagtcctgcgtcacgcgacggttcagcgtattgccgaggtatttcaacgcttgctgagcgaaaaaatatctatccgtaatatgaagatgattatggagtcgctggctttatgggcgcccagagaaaaagacgtgattgcgttagttgaacacgtacgtacttcattatcgcgttatatatgccataaattttcacagggagagacgctacgcgttattaatctctctgcggagtttgaagagaaattacggcagggaataagaaatacctccggtggttcatttttgaatctggaacctgcggtagcggaggaactcattgatgcgctgacgttagccacagataaattgacaatatctaataaagacatggttattttatcttcggtagatataaggcgatttgttaagcgctttatagattctcagtttaaagacttggaggtaatgtcttttggcgaaatcacggatagcgtatctattgatgttttaagaactgtctaatcaacaaggagataataatgaatctagatattgtaactttaattcgtgacacactattggaaacaggctgcgatgaatcgttattaaatgatttcgacggccactcgactatatcgctagatttttcagatcgtgccagcatgttaattagcctgattgacgatcaggtctggttatggtcgcgtattggtgaggaaaatactcacgtattaagtcaaaaagctgatgaccttttaaaaactttaatggaaggctgcgctttcactccgtcagggcaattacagttagccaccaatgacgggtatatcgaattaaaggggctagttaattcaagctataccgagaccagtactcgatttgctgaagcattagatgagttctttgcgctgcaagaaaagtttgtggaaattcttcaataatgagtgaaataccattgatccgttatcaggctcatcctttgcgcctgagcgggccgattcttgaatcggttctgccaggggtaaagatcggtgaaatctgtgaaatacgtcagcattggcaaagtaccgaggtggttgctcgtgcccaagtgctgggatttaatcgcgatctggcggtacttagcctgattggtaacgccaatggtttatccagagatgccgtgattagcccaaccggtagcgcattgacggtcgcactgacccattcattattaggttgtgtattagatccctcagggcaagtcgtcgaacgattctccgattccgccgccatattggggcatgaaattcgccccattgatgcaccgccaccatcatatttgcagcgcgtaggtattcgtcaatcgtttattactggcgtgcgagccattgacggcttgattacctgcgggatcggtcaacggctcggtatttttgctgcggcaggctgcggaaaaactacgctaatgcatatgttgatcgagcaggcagatgcagatgtgtttgttatcgcactcataggtgagcgcggccgagaagtgactgaatttactgatattttacgaaggtctgggcggcaacagcagtgcgtgttgatttatgccacctcggatttttcttctttggatcgctgtaatgcggctttagtggctaccacggttgctgaatattttcgtgattcaggcaaaaaagtggtgctgtttctggattcagttacgcgttatgcccgcgctttgcgggatgtggcattagccgcaggcgaagcaccagcccggcgaggctatccggcttcggtatttgaggctttgccaaaattactcgagcgtcccggctgtactcatagtggaagtatcaccgcgttttataccattttactggaaagtgatgatgaaccagatccaattgcggaagagattcgctctattttggacggacatttttaccttagccgcaaactggcggccaaaaatcattatccggcaattgatattttacgcagtgtgagtcgtgtaaccggtcaggtttgccaaccgtcgcatttacacagcgcagccgaagtccgacggatattggcgaaaatcgaagaattacagatttttgtggacctaggggaatacagcgccggagaaaatgcggaaaacgatcgcgctattcagcgacgtgatgatttattccgttggctgtgtcagcccgttgaagaacacgctgtatttgaaaatacattgagtcaattgcatgaatttgcttcgtaaattcactgcactactactgcgcagtgaaagcaaaactcagcgtcaggagcggatattaacgcagcttgatagccggatacgtgagtgccaaaaatctgttcaggctctagacgctcaacgcaaagcggcaaccggcctgttgcacagtttgcgcccgcaggggcagggactaaatcgcgccatgctgtatgcagtacagcggaaacagtccgcgcttcgtcgccgaattgccaatattgacctggaaaaagtacagcagctaacggatctgaaaagctgtgaagaggacaggcaaaaggcgcaggtgcagcgtctgagactcattcatcagtctgataaatacaagcatttgcaaatgcttgagcggaaagctcaccgccagatggccgaccgaatggaagaaaccgaaattgaggagattattgcatggaacaagtaaatagcgtttcaggagccaatacggggcgaacggaaaatatctccgaagttgcgcaacctatttccgatattgtcagaaagaaacagcaggaagaaaagggcgagcgttttaccgagatcgccgataaaaccgttccgtctatgccaaccctattatcgccgctattggccttgcaacttggaattggtcataacgctgactctacaaccaaaaaggctgaaataagcgcgctgaaaggatctaagcttcaggcaactcatccgcgtttggattatttaactcaggaaattcctgctaagccgatcgcacagcttcagcaaaggattcctgagcgtctaacaacgaaagatatgacagataaatccctactggctgctctaccgacgggaaaagaaacaaaaaatattgaagtaataagaaatccgcagccgttgcagaaaaatagccatgtcacagatgccatacccgttgcttctcttgcccggttccctacagataaaaccagcgagttttctgccaatggagatcgtcaaaatttaactgcgccgaatcatgaaaagttaaatattgtgcaacagattggcggcaaaccgacatcgactgatatgacagctactggagagagtgaagctttatttcctcagtttaaaaaagaggtaaaagtggattctctagcctcagataaagggcgccctgaatggttatatccggtaccgaataaatcaacccattcggtggtggatatagcaaccaaggctgcattgcctatgggaaaaaccgataagtttccacagccgcaatcaggaaataatgaaatagaagggccagggaaactcacttaccgttttaaacaatggggtgaaggacatcatgtcaatatttcaacgcaaacccaaaatcactcagctcaggtggtctttcaaccctcggacgccacggttcaacagcgtttaggcactggagaaatgccccagcattggagcttattgcgtgacggggaatcgcaacagcagcagaaacagcatcaggaacaaccgactcaggacgaggaggaagctcagtgattggccggtattttcgtcaaataagtcaggaacaacttgtctggtcacgtgttgctgaacattgggaacggcaaggtatcgacgtgagttttacgattcctccgcaaaatgtttgcctggtgtcatttgctactgatgccggttgggaaggccttcttgatttacgtaactggtttatgcaaatgatgccagaacaggcagggttagcgaccagcgcttttaccaatgaacaaattaaaaatttatttatcggatgctcgcagccgataaatatggcgttgccggaatttagctatcaatcaatgcagaatattgagacggttgaagataacaagctatttaatactccgttgtacgccatagatacggatcgcggtcgagtatggttgactaaatttgttcacgaatctgtcaatattccagcaaaaaatcaacggacagatttatcccatcttcctttgccgatatgttttgaaataggaagtagcaaggggagtttaaggttacttaataaattaatctgcggtgatgttttacttattactgatgtcaggcagcaagtaacaattcatggcaaacatattagatattaccagcgtaatggagatgaaataatgctagaggaagcgatgtcagatatgcctgtagaaaacaaatctcaggataaccagagtgatggtagccatgaccaagaaatatctatgggtttgtcccctcgctctcaaatgcctgttcgcttaacatttaccttgcaacaaactcaggtaacggttgaagaactggaattactatataaaggacatattttcacctgtgatcctgatgcggaaaagaaaatcatcattagcggtaatggcctggcactggctcgcggcgaattagtttggatagaagatcgcttaggcgttgaaataaccgagatataccacgaggctggcaatggaaaatgatgtttcccttgttgggctattagcgtttgccactttactaccttttattattgcctgcggcacctgctatatcaaattctccattgtctttgttatggtcagaaacgcgctgggattgcagcaaatcccttcaaatatgacgcttaacggtatcgcgctgttgttatcgatgtttgtcatgatgcctgtggtgcaagagggctaccacagttatcgcgagaataatgtcgatattagcagcgtagagtcggtgacttatttcgtagagaatggcttcgaaggttaccatcgctatttagaaaaatattcagatccggagttagcgcgcttcttctctgatgcgcagctaaaaagggacggtgttaaaagtggtagtgcagaggataccgaaagggtttctattttatccctgttaccagcctacgctctaagtgaaatcaaaagtgcctttaaaattggcttttatttatatctacctttcgtggtagttgatttgctaatttccagtattttgctggctttgggaatgatgatgatgagcccggtgaccatttctgtgccgataaaattggtgctgtttattgtgctggacggttggtcgctattgtctaaaggcctaatcacgcagtatctggatctggctctatagctcggagggctggaacaatgaatgaactcgtctttgccggtaataaagccttatatctgattctaatgctttccgctgggccaattgccgtggcaaccatcgtcggattaattgtaggcctgatccaaacagtcacgcagctacaagaacaaactttaccctttggtattaaattacttagcgtcgcgttatgcctttttttagtttcaggttggtatggtgatgtattgttgggctttgctcaagaagtattaacaatagcgttgaaataacctatgcaaatcggactgttttttaatattcacgactggctctacgcaatgatattggcttcggccaggttgatgccttcttttatcctactgccgttccttaataataatactctaacgggtatgatccgtatgccggttgccatgattgtgggggtgtcattgtggccttatccactccaggaactacctgattttgatacgttgttttatttcggactggttgcaaaagaagttatcattggactattaatggcctgttttttttgctggccattatgggtattacatgccgtcggtagcatgattgataaccagcggggtgcgacgctaagtagtagcatcgatccattaagtggtgtcgatacatcagaacttgccaatttatttaatttgtttgctgccgtgattatattagaaagcggcgggcttttgctcatctctcaggtatttcaagcaagttatcaactttgggacccactgtcttttactttgccttccctttatccagcgctaactttcctgagtattatgatggcgaaagcatttattctcgccagtccggttttggtcggctttctattggctgaagcgctgttaggtttattatcccgttttgccccgcaaatgaacgcattttcgctggcgttgacgattaaaagcagcatagcgttctttattcttattttgtatttcaccccgattattccagtcgaggtcattaatatgcgctttcatgcggattcattatttggctggttgaaataatacggtaaaatggacgttttatgtcatcaaataaaacagagaaacccacgcagaaaaaactgaaggatgcggctaaaaagggccaatcttttaaaagtaaggacttggttatctcatgtcttatcttaattggtgccgagtacattattaatatatcgagctttttagaaatggggaaaatcgttaccgaagccatcgcaaatggtttttccagtaccttccatgagtatgcgcgaatggtggcatggacgggattaaagttattgcttccctttttactgctatgcatatttgcgtccgtattcccgacgttgttacaaacgggatttctcatcgccactaaagcactaaagattaattttgcagcgcttaatcctgcgagcggtgtgaaaaagctatttagcttacggtcagttaaagatgtgatcaaatcatgtttgtatttggttagttttatcgttgccgcaaatattttttgggaaaaaaataaagagctcctttattcgcaggttaacggggcgcctcagcagattatattagtttggggggtgctgtttcactcgctgatcctgatatgtctctcttgtctgcttatggtcattattctggatgcattagctgagttcttcctgcacatcaaagacaacaaaatggataagcaagaggttaaacgggaagccaaagagcaggatggcaatccggaaatgaaatccaaacgtaaagaaatacatatggaaatgttgtcggaacaggtgaagtctgacattgaaaattccaaggtgatcgtggctaacccaactcacatcgccgtgggaatttatctaaatgtagatgttattccaatccccttcatttcagtgctggaaaccaatcagcgagccattgccgttcgtacttatgcgaaaaaggtcggcataccagtaatcgaagatgtgaaattagcccgacaaatcttcaaaactcaccgacgctattcctttgtcagtatggaggaattagatgaagtactccgtttactggcctggcttgaacaggttgaaaatgcctggagcagcgaggtccctaaagaataaacatcgttttacaaagatatttttcgctcattatttaagaattgcctgtgtttgaaaggggatgagcgttccttaaatgtagtttttatttacccatgattaaatatcgttatcggcagcagcattcacgcggtaacgaacaacctaggagataacaaggtatgacccaggaaaatacgattattagcgatgatgaaattgaaaacatgctgtgggctgctctcaatcagggtgccatgctaaaagacattcacggtgtatctgatgaaatgatggagcatatatatgctcatgcctaccagttttatcacaaggggcatttagacgaggctgaaaatttcttcagttttctctgtatgtatgacttaaataataccgattactttattggattaggcgcagtgaatcagctgaagaaaaactatcagaaggcatgcgatctctattctcttgcttatgtgatggggaaagataatttcagcccggtattcttcagcggtcaatgtcaattattaatgggtaattttgttaaggccatgcagtgttttgatttggtgtgtaagcgtagtgacgatgaaaatttaattaaaaaagcgaaagtttatttacaaactattcgacaaaacaggaaagaaacgaacgaagaggcagattaagccgaagatcgttacgtaattggagaaattatggctacgacgagtgttaataatacccctatccagcttgctggctatttgttaaatgacgccagcaatgaaaatatggcggcattaaagcaaaaaactcgaatgctgccgcagcagggtggttcaattatggcggcggccaatcaaaaattgcaggcagcgcaagaatctgcacgcaatatcatttccgccggcattgacccaacgctcagtggtgatgttgaagttgagctgaataatgcgcttttacaggaagctccagtcctgagaaaagcgaacagtaatctgactaaagacggagctctgttgctgttattaactcaaatgctgaatttaagcagtgaaatggcattgagtaaactctcgtctaacctttccatattaatgtctaccctggacgcgcgtaagaaagagggagaaaaggcaaatgccgagattgataaagcaatgggcgagaccgagcaggctttatctgagtttgaaaatgcggtaagccaattaggctcggctaataaaaatcaatcgcagaaaaaagagcttctcgatcaggccaaatcagatctggacaagctaaagagagaaggcgtagaaaaagacgatcctcgttatattgccgcggaaaagaaagtcgctggcgcgcagtccgatctcaatacggcagaggcggcaaccagtaaagctcaggccgtggcggatcaaaagcaacaagcggccatgagtctgcaaacgaaacttgaagggttaataaaggcggcggacgttaaatacagcgccgctttacctggcaacgcagctatcgctgggcaaatcgatcagcagaaagaaaaacagctcagcagcatggccaccatgaccatgctgatggggaaatttattgaaatcgtaggtgagaactcgatcaataaattaaagaatgatttagccatgacgcaaaaactccaggaagcgcgtcaaaaggatatgaccaaaaaagccgctgaatacgatgagcaactgcgtaaggcggaagaaacgcgcaagatgaccggctgcattgctgatattctgggcggactagccattgccattggtgctattacatcggtatttggcggcgccggagtagcattaatggcaataggtataggtttaatggttgccgaccctattatggaggcggcgacgggacaatctttgactggcatgattttaaatccatttatggaacatatctttatgccattaatgtcattaatttctaaagtagtggaagagatatttgataaaactccgattggtttattgcttaaagcaatagataaagccaccggggcaaatatgatggataccattcatagcgtagtttctgccgcagtgaccgttgcggttattattgccgtagcttattttgctaagtcagcggctaagtttgtcatcgaaaaaatgggtaaggcgatgacaaatatgattatggaaacgattaagaaaaccatcgagcaagcgctgaaaaaactggtgccgaaagtagttaaaagtgccggtaagcaagtgaatcaggttttcaaacaagcgagcaaaagcctgtccaagtcactatcaaaagatccggtagcattgaaaaagcaattgaataatatggagatgttacgtagcgtaaccaccgttggctctggcgtgactcaaaccaccggcaatatagtggcagggaatttacaggctgatgctatggaggcgttagcggcatttaaactcggtagcgcagatatggaaatactgaaaaaattctcagagcagattcttgcgtattttaaacaagagcaaacgctaatgcaggagttgatgaagaatatgtcctcggtactccttaaacaacaagacacaggacgtactattcttcgcaatatgcacgtttaatatcactccataacctaataggtaaataatatgtcatcatccattggcagtaatagtcacaaccttattctgaattatccgaatctagatattacaaaaaaagaattaaatggcgataaagagtcaattaaaaaaaatgcaaataatacgaatcagccgactgaatcgaataaatcaacggctgaaaataaaaatgtaaaaacagaggggaaaattagccctcaggcggcggcgctgcgagaacctcaaggtgagattcaaccaacggcgagtaaattgatgatggtggatttggctgagaagagaaccaccgctgcggtgagccctgcggacgacacgccaaaaccggcgattgccgcaccgacggttgaaacccagccaacgctgttgcaagagcagctgaaacatattaccggcgtcagcaatttcgctgctgaacaaaccaaggctaccgatgcagcacagcctaaacagggctttgccatcaccaatcttaataattcatttggtgccagattatctaatgtcgtgatgcttgcagtgaaagtattgactgaaatgcgagtggcggaaaataagctgggcggccatcagctagagctttcggctaaagcggcgcaagcctctgccgcacatactatccaaagtggtaaagaagcacgaaatcaagcgattactcaaggtgtcgttggtttggccaccaccgtgggtgggcaagctcgggcgatgaagggcaccaaaatgtcgaataaatcgcttgatgtgtccaaacaacaggctaatttccagaatcaggcgaacaaaagtatcagcgctctgaacaaagtggggccagggcaaaaacctggctctgccgtactacagaatgataaatcaattatcgaaggcggcgcgatccacgataaacaatacagtgcaacgctgaaggggatcgaaagcagtcgccaaatgaataatgcgcaaaaagtcattggtcaaggtaacgcggccagccagatgggcaaccctatgggggcggtagcggcgtcccagttccaggtgaatgaggctgaagagaaagccggcgcggcgattcaggaaaatgagaaatccgtcaagcaggaaacccatgctgaatcagtcaaacgtagcgaccgtgataagcaattgctgaatttgctgatgaatatgctgttccaaacggtaacggcaaaaaatgaaacgatcagcagcatgatcaataacaaagtgtagttgctaagcccccggagttttgggggcgatttttcatatgtctgagcgataagtgagtcagttatggatggaattactaataatcacaacactgtgcgtttttccgagcatttagcggttaattctaatgaaacgtcgcaggctcccgccgctgcggttaatgaagaggcaaaagctgctcgcatgaccatccggcaacaggttttgacgaaaacaaaaactcagttagataccttgcataattcagataaaatcgctcagggcgccaacgcgctgttaggcacattacgcgatattgagcagcgtcagcctgagcgagctgcgcgattagccgcattttctactgagggaaaaagtcagcaggattgtgataaacagctagagatattgctaacacccgataaaagtgacgctcttgctcgcacgcagttagatgcattacgtgctgcggcttcggataaaagcagccttgctcgccgcacattgttaattgacagcaccagtaagcaattgcaaaccattgcacaattggcgcaggcaaatcctgagaactatgacttaacggacgaacaagcggctgaattacaggctgccgctcggtctgttcggttcgctcctgcgacagaaccgacggaaaataaaggtccgatctccagttgggatatttataaggacttggccgacgccattggcgaaatggatgacagttatttatccgtccatgagtacgcagtgaaacaatattctgattttttcagtgatttctccgatctgaaatctaaattacaggaatttattagttccggtaaagacggaaatatcattctgaagtcaggtgagatcagaaaggaattagatgcattactgaaaaaatattctgtaaaccctgtcactaaagccgccgttttatttcctaaacaaagtgagaccggtgggattaaaggggcatctaaggacgatgcaaaggcatgggccagtgaattaggtgttgatccagatacctgcgttaaacaactgcctgatggttcttgggtttgtaccatagacaccagcccgctaacaaaaatgaaaagcgatctgccgcataacgatgttgaagatatgaactctgccaaattccaggcttggatggcaggttttgacgcgcaggcagaaaaactacaaacagctatgcaaagccacttacagaaatacagtaccgccagctccacgttcgataatttaattaaagttctcagtagcactatctccagtttgcttgagacagacaaaagctttttcagtaattagcgataaggaaagaatatgccatcttctatacaactggctgtcactcctcaacttgatttcagccgtatcacgcagaacgctaatacccatagccagtcttctgtggctgcgaatattagtcacatacagaatgtgcctgttaaaccctcaacagaacctgcatgcaataatcccagcagcaagtgttctaatgtgcgtagcgtttgtgcccagttacatacccaaacgcagtcgcagttgcagggttcaaactcccctgagccgcaggctcgtgctgcgaccttaaatgctcccgctgatattccaaccggcgagattttttacggtcagcatatggaacaggctaaagaagcctttctctccgagctaccggcagacaaaaaggctgaggtcaaaggaatattagacaatgccattgatgcaaaggggaaagataatgtcctgagatttatgcagttatttagcgaaaccaaaaactattgctgcgaaaatcagcttacaggggagagtaaagacaaggcgttttctgatatcgctaattctttagtcaaactgctgacacaggataaattgcgtaataattctgcgctaggcgataatagtacaaaaaagaatcacgaaaaatttgctgaattgcagcagaagctaattagtatgggatcagcggaaccgaaaaaacttggtgaacaaatattggttaatcaggtgtggccgctggtgtctgcttattttagcgataatgccgatcctcacgaaatatttcgtgaatcattgtcattgctcgatgggcaaagggatcaaaatatagcggacagtgccaagtcgcggtttgagaatcttactcaggatttcaagctgattgcggtggtattaaatcttctgcaatcgagaattaacgctccgcagggagacaccatcgacggcccaaatccgcccgcggcaccgaacagagaaacgcctgccgctccggcagcaccggccacgccaacgccaacagcaaacgcgcctggagtaacctacaatacttacaactattactttggtgctagttcctcatcgccaactcagccggctaatccaacgactgttacggtaaatccgactatcagccctttatttaatccggtatttagcccatctattaatggttatccggcaggtgacagaccagcatcggctcatgcgacggagactaaacgcgttaatgttgcagataaaactctggaaaacgatgggcagaaagacatcgcgcaaagagaggcaatgggtaagtcggtcattggtgttagtaatgacagcaagccaacgccattcacaacttttgttgatggtaatacgccgggaatggattcaacggaagttcgtgaacccattagccccgcgcctttgatgaatcataaatcgattctgacccgcgacaggtcagcgcagggggatcatgtacctgcgactgaaacagatacccacgacgaattggtggtccagaaaaaagtttctcatcagtcagagataactcggtcaacccgtgtagtaacagatagcatttcacagcttgattcagatgtggtactgcgtagcaagaattctaatcatgaaacgggagtctctactcgttccgcgactattacagctaatccgattaaggctgagataaatgcgccagagacgaacgcgcaggtaaataatagggtagtgccgccacggtttaatggttccgctacgacgtgggattcagttactccgtatttgccgaagcaaaatcatgtcaatccgcctaatacgcgtactgtagggcctgcttttatcggaggaatggaatcgccaaaccgaattgatcaattaaaccggagaagtagtgaagcggttcgtaatagcggccagtttttgcctaagatgactgcggagaaaacctcctcaccagaacaagagagtcataatgtcaatcgtacccgcgtgataatgccgccaaatcggccattgaataatcctacggtgcagactcaggttgaaacagcgttaaatattactgaaacagattctatttcgacaccaaatgcagcacatactaatttaaatgcagtacccgaagagcatccagaatcatttaccgccaaacgccaacgcttcgaagatgagagtaaagggcgtgatgcgtcacgattaaaacctaaaaaccctgcacctgcggcggttgattctgatcgaatagtgatgagtccaggttcttcctcggcattatctgggtatcagcctcctcgcagcgcaaacaaataaatttaactgagctaatttcacctttccttattgtagataaggaagggtgaaattaaaggacagattagatatgaaagcgattattgatgaagttttggtgtcctgcctattttgtgagcaggttgatatttcaccagataagcacattgttaacgatctttatgctgactccgttgctttgcttgatattacgatggctttggaagaacgattcggatttgatttcaataaacaggatatcgagcagtttgaaaccgttggcgacctttacgaaattgtcatgagaaatacggtaactctttagtagtatcttaatgttcaatgaaaatcattattttcttatctcaaggataaatcaatgactcacaaatcactttgagttaatgcatcagccatcatagttttgtaaatatatgtatatatttatcatcggcagtgagtaagatattgcgcagaatctttctttatcaaaaggccttaggttacgacctcaaaaaaatcaatttaatctaaatcataataattataatgatcgtttttttaaagtaatcacttagtgatctggttaattatataagcatgtagatatcttgtgagtttatatttgcaggccgattagtctatttttcagcatggctgcgactcgttagatatgttgcataataagaatgatttacattacaccttgtaaaattaatattcccttttgattttttaaagggtgaacataggaaagagtaaactatgagggccgcaaagtgattcagcatcgatttggtaattactcattaagctatgatggcgaccttatgcatcttaacgaacgtattcttattccaccgaaagaattggcgctcttaagattgtttcttgattcacgagagcaactgctctctaaagatacgattattgaaaaaatctggcatggtgtgcagatttccgatgagtctttaacccgctgtgtttatggcctaaggcgattattaggtgggaataaagattatattgttaccgtatatggacgaggttatcgctttgttcctcctgcgaaggaaaaagaagcttcaacgctgtttttctcccgcagtaatagcttctttcaacggccggatcgattcatctatccattactaaattaatgttaacttgacggttaactatatggttttataatgatttttattgagctttacttcgtgttttgagagggcgtattttatatggctctctcgctttttcatgctaactcttctacttagcctgttcctttcggactgtaaacctgcatcaatctctcatcattttttaatcaagatctcactctaaaaaatgtttctaatagcgccagtaatttgaatatttcaataaattaataacgcgcgcttggggctagaactctcaattatggttaatgaaactgaacatggcggcacatcaccacgcattgttgtgcgtctacttaacagtgtcttgcgagggtgcgagtttgttttagactcgggtacaactttatttatcgtgtctgaacgggagaatattcacgctcaaaattcaggaacggtacttccagaaaatatgatatttgttcctatggaacaaggcggtgttagctttgaagccgtggtggagaataatcaaaatgaaaaaaccactctaacactacgagagttaaaacctgacggtaacatagaaaatacagttaatcttaacgaagtgattcatatcggtactttagatctcgccgcgcgttttgaacatgatacgtggagccaggatatcctcaaccatcctgaaacgggaatcaaaaatacgtcaaagccgatggagaagaaaaaaggttggttttggactgggctgatactcctgttgctcacgctgtgcataacggtttggggctatacctattttaatagccagcagcgcaagattttagaaatttcgtctctgcttggatataaaaagaatcagtatcagtatcttcagggaagagacaagataacttatattctggccaatgatgaaaaatcaatgtattgggcacaacaagccttggtaagaaatccaccttcatcttcagttaaagtggtcaatatcccggcagaggagtcgcgtattagcctttggctgaatgaacattggccagcgttaaaatttcatcgcatttatctcagcaatcccacagagccggttgttctgttgagttatgaaagagggcgtctggacaatactcagaaaaacagattgtctgaattgctgaaaaaagaaataccttatgctgattcaattgtttttaatcagatgaaagattcgttagtggcgaaagaagctgagcaaggcttgagtaaaatgtcgattgtttttagtgagaataagaacgttgatagcgtcacttttgttatccggggagaaatggatgacagcgaattacaaagaataaagacctttgtccaaagttattatcagctttgggggggccagtatgtgcaattttccatagagctaaataatgactggctcaagggcaaatcctttaaatatggtgatcaggggtatgtaaaggtttctccttctcactggtattttcctaaacctttatctttaaatgagaaataaatatggctaatcctccaatttatgcgacacctccatgggaaggttttctttccgagaaatcagcctcttttgatactggcgtaaccagtttgaacgaggaacttgagaaagcattggcctcgttgaaaggggatccatctgacccgatgctgttagcacaatatcaatcacgactttccgaatatacgttgtaccgaaatgcacagtccaacgtggttaaagtctataaagacgttggttcggcgattattaccaacttccgctagttattacgtatgagttattacacaaagggtatgactgccctttgtcattaattaattgagatcactatgtccgaatctattactggagttatgtccgtcacggcgttttctcatgatgcggtgatggcatctgatgatgttatgtcgctagatagtctggttatgcaggctctggctaaaggcgtggtgacatctgatgctgaaaaaagccatgtgctgaataaaatacaggacccgcaaacaacgtcagatccggcacagctattcgagttgcagcaaagaaccgctgaatataatttgaaaatgtccttattcgccacgctgacccgaaaagctatcggggcagttgaaaccgttgtgcgtgcataacaatgcttaaatttaaaatacttgttcctctgttgttgttgttattggtcggctgtaaagagcaggagctgcttaaaaagctcgatcaaacgcaggccaacgaaattatcgcgttattacagcgtaataatattgatgccagtaagaaggaaattaccaaagaaggctatgtggtatcggtcaataagatcgatttcgccgcggcggttgatctgatgaatacctatgatttacccaccagacctcgaatagaaattgccgaaatgttccccagcgattctttgatttcttctccacgagcggagaaggcacgactttattcgggaatcgagcaacgtctcgaacagtcgttacaaaccttgcaaggggttgtttcagcgcgggttcatgtcagctacgatttaagctcgagtgaaggccaaaagaatagtattccggttcacctttcggcgctggtgaaatacgatgctgaaaatattgatgccacagtgatgatcagcgatgtgaaacgcttcctgaagaatagctttgatgacgttgcctataacgatatttcggtggttctttccaaaataccgcaaatgcaacatcaggctcctttcaccgtgaaaaaaggtttaggtgggacgctgtggtttatgattgccgcggtaattctctttattttttccagtatcgctatgtacctgtatcggaaaaaacgcactgaaattcatccagcggcggaaagtgaatgagcttgaagaagggaatgggtgttagccagcttgaccggatattatttgatcctttgtcctggatacatcctgagcgcgttcgaattcccgaccaatttaaccgcggcctatgccgcagcgtaatcaatcaagtcttgcttgacgcgttgaatatttcgacacaatacgaccacaggatatctaatgggctaacgcgcctttttattgataactggttcattcttcccaaggtggcttttttaatgagctgccagcgttatcgtgcctgtctggcatatggtggaaagctggaaatgctttctgctatggcacgtcagttcgcccaattagaattaatagaaaccagtcgttgcccgtcagatatctcgccggatgttcagtggctgcgggctcaggcaataaatgaattattgtgcttcagtcaggatttacctgacgcaatcaggcaacgtattccattactctttcctggcggtggagcaatcagccttgagcggcagataaatccgactgctgatgtattgttattaaggttagctatccaacatgcaaaacgatatagagactagccatccgctaaatgcgctagaaggtatcttgttaactaagtcggctattttacgacgcaagatggctaaaaatattctggtagaggctcagattcgcgccagaaaaataattaaacaggcgcaggcagacgctgaaattttacatcatcaggcttatacccaaggttatgaaaaagggatagtgagcgcggcagaagccgtagtcggttatatggaagattatcagtctctcagccaccaattataccaagagttacagctcgaggttaaaaacatgttatcggggatattacatcaagacgaagtttttcttgccctgctggataattggttacatgaattgcgtgttgaagatacgccacaatctctgcatctattacttcctgcgacgatgaatcaaggctcgaaagaattggctggattgctggagcgaatttggaaagggccggtggtgattgattaccacgccgatcggcgttttgtcatgaaatataaagatcagctcgctgagtttattccagatgagtttattgatagcgaaatgcccaaactgttagggacaaaatcactacgggaatcatgtgggaaactgtctgagaatggcttacagcggctgagaactgtactgactcgacatttggataacgcgccacagaatttaccggtaaacgaggcgtaattaactaaggatgaatgtgatgatcggtgatattaataagattagcggtgggaaccttgcaggggatgtggctgataacacaaaggtagaatcgctggatgtcatgatgaatcaaaaaacagatatacccatgacgcctgaagagtttgctttcaaaatgctttataacgagtggatgcaggaaacattattatcagacggacttcgccctgaagataaggttgaatggtgaaaccgatgatttttaaaagaacaacatcaccgctatattttctccctttggggctagtaattgttctgagtggctgtagttaccataaacaaataacccctttgtttaaatcgcaggaatccttaacgcgagctgaaataataaagcagttgcagtgcaatgatgctaaagataatacggctgactcattgttaccggtggcgctttaccagcaaatgaatcaatgtgctgaacagggaaattaccgctcggctacgttgttattttcattagcgggaacctacacctggtacgacgccagtcgaatagatacggattcggcgcgcaataaacatgcacaattactgggagaggctctcggacgattagcgccagagcgaagagaatacctgtggcgcaatattcaatcggtgctaggagatcgccaacagctggataccgtttgccaaatggttcgcctgatcggcccgccagcataccagccggattatatggctggaggtgagggtaagatgatgcctgatttttcggcgttgccacgttgggatggagcattgcagaattatctacattgtccgatagattaaatggtcggattgatattggccagccgcttttgtctttccattttcaatcccttcatgccaatggcgtttgtaaattaggggtggccaatttaatttcccatcgttcacaaacgccggttccaagcagtgattcagggcataacgcggataaatgcaaataatagtgccagtaggataacgattacccccgtggctacagcaagcctttcagaaaatagacgacgcattaggaatatccttaggcaaagtgataacgttcggagtggtatttggatagcggcacgttcaattcatccaacgctttttctatggcatccatcatgatatctgggccgcagataaagtattcatggtctgcatattcgggcggcagatgacgttttagcagttcaccggtaataaaaccacgttcacccggccaatccggcggtggctgggtaagtacatgtaccaccttcagatccagttttaattgcaacgactctaactcttcgcgaaaagtaatggattcccagcttttactgccataaagcagaatgacagggcgtttatccccgcgatcggccagcgtgcgaatcatgctcatcatgggggtaatgcctacgccgcccgcaatcaagatatgcatatcggccggatgacccaaagtaaaagcgccgtaaggcccatcaaggtaaagccgttgtccgggagtgacctctggaattctctgagtaaagtccccaagattgcgaattgacatctcaactcgcccatcctgagcctcggcgctcgacgaaaatgaaaatggatgaccggtaatcttaaacgggctgccccaaagcgttaaccagccaaactgacccggagtaaaacgaaagcccttatgcccatccggatgcatcaccaaagtcacggtatcgccgcgctcccggcgcacttcgctcactctataaggttttcgtagcataaataacggcttaaccaggcgaatgtagagcagcaaggaaaaccagaaagcgatcagcgccacccatagcccgcgtttccacgggtcttgcaaatagaaactccagccaatcatatgcagaataccggcgatcaccgccagtaatgcgagaataatgtgggttagatgccaaatttcgtagcgaatttttaactgcacacgccataaagccgtcacaaccaatgctattaatgaataagttgaaatagcggcgaagcgggcgcgccaaggtgcttcgataaaattcagcagagccaggagttcggggcgaataacaaacagaattatcgggtgagcgataaccagcgcaacggcaatcagagaaatgcgacggtggaagtgataaattacgtcctccccccaaggttcagttacatagcgaaagcgagcggtcaggccgaattgtagccccatcatcgccaaaccggcatagcctagagccacagaaaactcggtccagaaatctcgcgcaggcggcatggtgccaagcaacatggcaaatagcggagccagaataaagaacagataggttagaatccaaagcgtgctgcgtatggcataaggcatctattgtccctttttctggatcacgatatgactaagtataatcggacaatataagcctccatttttttattaatcttgaagcgttcccatgcataactcattgtaaaaactgaattgtgccctgcgagctaaattagctaaaggggaggggaaataccggcgggctatcaccctttttggcgtcaacgttgtcaattcagtcggtttaatcaattggcttaattaataggagaatagcaaccggaaagtcatctatgcggttatagcggctcttgttgtgttgtgcagtgaataccgccaccgcctgctgcgatcccgtcaatgttaatcatcacgatatctctatttggataaaggtgtttaagctgcgctttggccgctgtatcagtgattttgtcgccaaactccggtgcaataaccgcattattacagacatagaaattgatataaccggcggcaaaatcgtggtttgcatattcccctcggctatcagaaggattttctaataccacgacgttgagcttacggcctttggcgtcccgcgcattgcgtaaaatagccaaatgctttttagtgacttcgtgatcgaaagactgcggatcgggatcgtaaccagccaccaccgttcccggcgtggtgaaacgggcatagaaatcggtatgaccatcggtaatatctttacctttgataccgggcaaccagatgattttttctaaacctaacaggcgcttgagttcggtttcacaatctgctttgctcagacttgggttacgattttggttcagcacgcagctttcggtgataatggcggtgccttcgccgtcaacctcaattcctcctccctcaagaaccaggtttgtggtcatccgttctacgcccgcctgttcagtgacaaaactggctacgtgcgcatcctgtcgatgcagttgcttatttccccagccgttaaagttaaaatcaataccggcttttttaccctgagcgttatggacaaacaccgggccggtatcgcgtagccacaggtcatctaatgggcaaatcagcagttctaacgccgacccgattaattgataggcgatttggtaatcatcctctctgacgagcatggtgaccggctcatagtcggcgatagctaacgcaatggtggcaagattacgctgcacttccggtaataaacgaccgccccagatagctttgctggcaccaaatgccatccaggtgcgacgatggggcgcgctttcgtcgggcatcatccagcgctgtttatcatcctgatcaatcatagagaacaccttatttgattgtaataataagccgcccgccatcagcgtggcggcctgaataaatcgtctacgggttgccatattttcgtccttcgggtttatgtttactgtagataagtatcgctggtgcggtagcttatctcgcgctggcaccgttcatttcctgcatagcggatgagtggctttattatctgccttctgtttcttgataaaaattgatgtttattgcattaataccccaataaaattaatgtgtgagtgaaaagtgaaccgtattccctctctcaaactattaatggggttcgaagccgcagcgcgattaggcagttttgcgcgagccgccgatgagctttgcctatcgcaatccgccattagtcatcagatttcgcagatagaagctcagaccgggcagccgctgtttcgacgggttggccgaggtgtagaattaaccgtagcgggagaagtgttacagcgaacggtactgcgcacgctggaaactttgcgtagcggaatgagccggattgcgacttatcttgatcctgggctggtggcgatggtttgtccctcgccgatattacagggttggttacagccgcgtttagatgcgctacaacagcagattcccgatctttgtccgctgttatcctccgatgaaaccgcccgttttattgacgaaattgatgtggatattgccattgggagtcgacctctcgatcaggaaggattgctacagcttccttttttgcaggatgagtgggtgatggtggcgagcgctgccgtagcggaaaaattgattcttcacccggcgaatcaccacagtgacatcaccagcctgatttgtctggaggagcatctcaccggtgagaaaaccggcgcgctgctggcgaccttgttacagcgcttccggctgtccgccatttatgatgatcaatctggcgtgatggatgcagtgcggcggggaaggggaatggcgttgctgtcccgtttggcggcagatagcggattacaggatggaacgctggctgtggttgacgactatgcgccgttgccggggcaaacgttctggatttcccgcgtggcaggagaggcgcgatcgcctcaagtcatggcggcattcgcttggctacagcagcaaaataatatatctgagtcattccaaaaacatatttgattgactacagataacccgctttaatttgctgaatggggttttaaaatcaatcggtagcgattaagtgcgagttaggatgaaatgtaacaaataagttaattaactccatgattgcaggcgttaattttatttagtacattgttgcgcgtatttagtctgtatctggtttttagcacgcctaattggaaaattaatacaatctagagaaatagggatatatgaaaacctctcataagttactcatcagcttcatttgtgtcgctgcgctttccggctgtgcacgtaccgttcctgtattaacgccttacaccaatatcacgacccataattctaccgaacagatcaaaacggccatcctggatgcaggtcagaatcgtgactggattatgactccggtggcgccaggtgtgattgatgggcgcttaatgaaccgcgatcacagcgtgaacatccgtattaactacaccccgaccaactacaccattaaatatgtcagcagcacaaacttaaaatctgctaatggaaaaatccatcgtaattataatcgttgggttaataacctcgataaagatattcaaaaacgtttaatggctaatgctaataaataatacggaaatttgagttaagtcggggccggattaaccgtaatctggctttggcgatttgatattggacatcaaaccatggccgtgcgctataactacgataaagataatattagtgcgcttgacgcaattaccgaggcacagagaattgcttttgcgcccatgttatttcaagcggcggtaaatctcagggattcaggcattctatcgctgttggataattgcagaaagcagggcgcgacccggcaggaaattacctgcggctgcgagctgaacgattatgccgtaggcgtgttgttagatatgggcatgagcgggaatattgtttaccaaaccgaaggccgctattttatcggaaaaattggccactatttactgcatgacgctatgacccgcgtcaatatggattttacgcaggacgtttgctatcaaggcttatatcatctgaaagaatcattacagcagggtaaaccggctggacttcaggttttcggttcctggccgacgatttatccggcgctgagccagttgcctgagcctgcgaaacaaagttggtttgctttcgatcatttctattccgatggcgctttcagcgctgctttgcctcacgtctttgcccttgagccggcaaaaatttacgacgtgggcggcaataccggaaaatgggctttacgctgctgcaaatatcatgcgcaggtcgagatgaccatcatcgatttaccgcagcaaattctgctagctgagaaaaacatcgcgaagcatgggctgtctgagcgtatttctgtccatgaggcagatatattgaccgatgtgcagttaccgcaggaggctgacgtttggtggatgagccagttcctagactgtttctcggaagctcagattattgctattctcaaaaaaaatcgcagcggcgatgaagcccgacgccagagtgtgtattatggagctcttctgggattgccagccctacgaggctggagcatttagtttaaatgcttcttcgctgtattttacctgcatggctaatggtaacagtcgtttttatagcgtcactgatttcctgggttatttacagaaagccgaccttgagttggaaaagcaaatagataatcttggcattggccatactttattgatttgtaaaaaacgatagcggctgactgaaaaaagccgaatcgaggcactaaccgaaaaattataagaaataaggggcaattgggcatcagtcaattattgcctcggtatttttctcattttctccgccagagatcacgaattcatgcagtttactctgaacatcaccgattggcaggctatcgcgcctggattagccttggcagatgaatggcgcagatgggctaatcaatcgcctgccaggatagatcacacccagccgctggctaaatgtagcctgttgccgatgatgacggctcgtcgcctgagttcaggaagtcgtctggccgtggaatgcgggttagcgattttgcgccgccaaccggtggatgcgattgtatataccagccgtcacggtgagttggagcgtaactaccgcattttgcaggcgctggcgacggaacaaagcctgtcacccacggattttgctatgtcggtgcataattctgcggtgggtaatcttactatcgccgccagaaaaccgctggtttcatcgtctttatccgccggcgcggaaacttttcagcaaggtttgctcgaagttatggcgttacatcaggccggctattcccgcgtattaatagtggatttcgatggcgtaattccagatttttaccatccatatatgacatcggatatgccaaaatatccgtttgccgtagctttactgattgaaccgggtgatatcttgcgctgcgctacccgcaaggggctgtcgcccgagccggaggtgccccagagtctgcaatttttgcatcattggctgggttcgcacgcttcctttgtcgtaaccggcggtcgatttgattggcagtggagccgttaggatgaaagcgttgaagctggggcgacaaattaatgggctgtggcggctgatcatgacggggctatgttttgccctgttcgggctgggcgggctgttattatcgttgctgtggttcaattttctcctgctgactcagcgtgatggtcagcagcggcgcattctggccagacgcagcatttccgccagttttcgcctgttcctcgctttggcccgcaggctgggtgtgctggattaccgcttgcagggcatcgaaaagattcgcgctgataaaggttgcctgatcgtcgcgaatcatcccacgctgttggattacgttattttggcttcggccttgccggacgtcgattgtctggttaaggctgaactcttgcgtaatccctttgtaaacggcgtgattaaagccgccgattatttggtcaatagtcagggacaaaccctgctgctggcctgtcgccaacgtttaaaccgcggcgagaatattttgatttttcccgaaggtacgcgcaccagtccgggaaaaccgctgaaattacagcggggtgcggccaacgttgctgtccgttgcgagtgtgatttgcgtattgtgcatattcactgtagccaacaaacgctgaataaacagagccgctggtatcagataccgccagaaaaaccggtgttcagcgttgtagtgggcgaacgtattgctaacgaatattttgtggctgtcgaagaggatgcgcaagcgcttgccgctcgccagctgaatcgacaattagcccagttattgacgcctgagaatggccaacccatggatacggatgatgcaagaacgctctcttgaattaaaaaaactaattattgataccctgaatctcgaagatatgactcccgatgagatagacgcagacgccgcgctgtttggcgacggtttgggactggattccattgacgcgctggagttaggtctggcggtcaaaaatcgctatggcgtgatgttatctgccgaaagcgaagaaatgcgtcagcatttttactccatcgccacgctggcgtcattcattcaatctcaacgcgctaaatagtcggataacttatggataaacaagatatttaccaggaagtgtcggatctcttggtcaaacttttcgaaatcgaccggtcgcagatcacgccgcaggcgcgtctgtatgaagatctggaattagacagtattgacgccgtggatatggtggttcatttacagaaaaagaccggccgtcggatcaagcctgaatcctttaagtctgtgcgtaccgtgcaagacgtcgtggatgcggtagaacaattattacagcaaccaggctgatcggttgtttcggaaaaccacgccgtttatgcaaaatttcctgcgcatcgccaatgggctaattatgttgttatggccgttcattatttgggcgggcgtgacacagggtctgtccttctggttaattccgctgtttattgcctttttcctgctacgcctgtggttactgaaagatcatggggggctgcaaggtcaaacggacggccaaatgtatgcggggaaagcgctggcgttaaccggtattgctctttgcgctgcgagcgtgctgatgcgcgatcatcatgtgctgatgtattacccggtggcggttaatctggtgctgttgattctgttcggcagctctctgttttatggcatgccaatcgtggagcaaatcgcccgttggcgtgagccggatttaccgccgcagggtgtgcgctatacccggcgtgtcactcaggtttggtgtttgttttttatcatcaacggctcgactgcactggcgacctgtttgtataacgacatgaaaatctgggcgttatggaatggcatgctgagctatatctttattggcggcgtgatgggcgtggaatggctggtacgccgacggataaaaaaccgatgaatacattaccgttgactcaatggctgtctgaagaacgggcgggtagcactttgattgcccgccgcggtgataaagatatcgacctgaagacgtttcgacaggatgtgacccagctttatgcgcgcctgataagcagttcagaaacctgttgggcgctgtgttttaacgatagctatcagttttgtgtcgcgctgctggccacgctgtacgcgggcaaaattccggtactgccagggcataatcggcgagcgcagctcgttgagcaaagccagcatttcgagggggtattaagcgatctgccgctgaaactagactgccctgtgtggtcgctatcggacaccgcccctgcgagcgtgccgttaccgtcgattgccgctgacgctagtctgcggttattcacctcgggttcctccggcgaaccccgtcgggtggataaaccggttgccgtgatggatagagaggccgtctggctggctgatttatggggcgatcggctgagtcactgtgtggttcgggcatccgtaagccatcaacatctgtacggtctgacgttccgcatctggctacctttagcgctagggctgcctttcgccagcgaaacggtggagttccctgagcaactggcgaacagtccgcgctgcgcctttattaccagcccggcgtttttacagcggctggatagccagttgccgccgccgcgttgcgaatgggtggtttccgccggtgggcagctacattttgacgatgctcaacgagcgcagaactggctcggaatcacgcccgatgaaatttatggcagcactgaaaccggagtgatggcatggcgtagccggcatcatccgcagacaccgtggcagccttttagcggcgtgcagctgagtcgcgatgagcaggataactggcgcgtggtttcccctttgattcccgatccgttgggaatggcgttggatgatcgaattattgtcgacgatcaagggctatttacactggccggtcgtcgcgatcgggtagtcaaaattgaagaaaagcgtctgtctctcagtgagattgagcggcgattgcagactttgtctggcatcgaagacgttgcggtgctggtggttaaacgcggtgcgcggcaatgtatcggcgcggcggtggtgctgaatcaggcaggattggacgaattagagcaaatcggttggctgcggctgacccgccgctggcgacagcagcttggcggttggctggaaccggtggcattaccgcgctattggcgcaaattatcggttattccgcttaatcagcaaagcaaacgttcttggcctcagttacaggagttatttaatgaaacccgttgagctatcccgtcaacagtcggaacggcatcagatggaggttagactgtatctggaccccaaattaagctggtttaccggacattttgacgtacaaccgctgctgccgggcgtggcgcagatcgattgggtgatggggtacgcggcagatatcgcgggcgcagcctggcagttttccggtatcgataaagtcaaattccagttgccgctgttgccgggcaatcaggtgttactccgcctcgattggaatgaatcccgtggcttgctcagttttagctatacgctggatgaaggcgtcgctgcgcgcacggccagtagcggagccataaaattatgtcgttaaccgttcacgccttcgcgccgtgcgtggttattccttgctataaccacggcgcaatgatgaatgatgtgttggcgcggctggctccctttggcctgcactgttttatcattgacgatggcagcgaacctgccacgcaacagattttacagcagttggccggaacgcactctggcatcacgttggttagattgccttgtaatcagggcaaaggtgtggcggtattaacaggttttaccgtggctgccgaggcgggatatagccacgtgttacaggtggatgccgatgggcaacactgtattgaagatattcccgagatgctgaaacagtcgcagcgctatccggatatgctgatctccggccgcccgatttacgaccagtcggtgccaaaatctcgtctgtatggtcgctatattacccatgtgtgggtatggatagaaactctgtcgctctccctgaaagacagtatgtgcgggtttcgggtctatccgctggctccggtaatagccctgatggcgcaatatccattggggaaacgtatggattttgatacggaaatcatggtgcgcctgtactggcaaggcattgatagtcgttttgttcctacgcgagtgacttaccccgccgacgggctttcccattttgatgcactgcgggataacctgcggatttcgtggatgcatacccggttatttttgggcatgttgagacgtctcccgcaattgttaacgcgacgtcgtccgcgtcactgggctggagtcaaagagcgtaaaggtctgaacggcatgcgctttatgctcgcggtttatcgtctattagggcggaaaactttcgagatattactacgtccggtagtgggatatttctggctaaccggccgaactcagcggcaggcctcgcagcaatatctggtacgtttgcagcaaactgcccagaaaaagtcattggctttgccgggcaatctaaccagttatcgacatttcctgcggtttagtcgcgcgatgctggacaaagtcgccagttggcgcggggatttgcgactgggggagcaaattgtatttgctcccggagcgcaagaaaccattaatgccgagtctgacggtgggaagctgattctggcttctcacctcggagatatcgaggtgtgccgcgcattagcacagcaggatggtcatagggtaattcacgctctggtatttagcgaacatgcccaaagatttaagcaggtattggaagaaatcgcgccgcaggcggggattaatctgattcccgtgacccgcatggggccagaaaccgctattttgctgaaagagaagctggacgccggtgaatgggtggcgattgtcggcgatcgtacctcggtgactacccagcgcggtggagaccgccgcgtggtgtggagcgaatttctcggtgcgcccgcgccgtttccgcaaggaccatttgttctggcatcggtattgcgctgcccggtgttactgatgtttgccttgcaccagcagggcaaactccatatccattgcgaaccttttgccgatccgttgctgttgccacgtcagcagcgtgagaccgcattgcaacaggcggtggatcgctatgcgtcacgtctggagtactacgcgctgcaatcgccgctcgactggtttaacttttttgatttctggcggctgcctgattcgccgtctggcaaggagtaacaagtgctgaccgatgcccgttttaccgccgaagtagagattaccgtgcctttccacgataccgacccgatgggcgtggtatggcacggtaattacttccgttatttcgaagtggtgcgagaggcgctactgaatcagtttaattatggttaccggcaaatgcgtgagtctggttatgtttggccggttgttgatacgcgggtgaaataccgtgacgtgctggagttcgaacagcgaattcgggtcagagcccacgttgaagagttcgaaaatcggctgaaaattgtgtatcagattttcgatgctcaaagcggcaagcggactaccaccggctataccattcaggttgccgtcgaagaaagtacgcgagaaatgtgttttgtcagccctgatattttgtttgaaagaatgggaatcaaaccatgaaaaaatggattttaatgttgtcgctggcgatcgccgctggcgcacaggcagtgacgctggatgagttacagcagcgtttggcgcagcagccggtggtacgagcgcagtttagtcaggagcgccagatcaaggatatgccgcagccgctgcgttccagcggtgagttactgatcgcacagaaaaacggcctgtggtggcaacagcaaaaaccttttccattgacgctggtgttggatgataagcgtatggttcaggtaattaatgggcaggagccacagattgttaccgctgattccaatccgcagatgttccagtttaaccacttgctgcgcgcactgtttcaggctgagcgtcaggtgttggaacaaaatttctcgctgaccttcagcgacttaggacaggggaaatggcagttggagctgaaaccgaccacgtcgccgctagataagctgtttaacactatcacgctgcaagggcagcagtatctcgatcagatttcgcttaacgatcgtcaaggggatcgcaccaagattacctttagcaatcagcgcctgacaccagatacgttgacccatgatgagcagcaacgttttgtcttctaagccgagtttatgggcctggctatggctggcggcttgcctgttgctgggggcgacgctcacggtattgttaccgcaatccaagctttccagtagcgtgctggcgctgttacctgcgcaaagtatggggcagattcctccggcgctgaacgacggttttatgcagcgtttggaccgtcaggtggtctggatggtcagccccgccgaaggcgatgatccagcggcggccgcgcgctggctggaacgcttgcagggtctgccgtcgttgaccgccgttcaaggacctatcgacgctgatcagcagcagaaatgggggaaattcttctatcagcatcgtaatggcatgattgacccgcagacgcgacagcgcctgatgaacggtggtgatgagcaggctaactggatactggcacagctttattcggcctttgccggtgtgagcggcagcgaaataaagaacgatccgttgatgctggtgcggggctcccagctggcgctacaacaaaataccagccgtttgaggatgaaaaatggctggttggtggctcaggatgaggcggggcgcagctggtattttatccacggcgagctgagtggctcctcctacaatatgcagcaggcgcatcaggtagtgacagatttggcggcgctcgtgaccgatcttaagcatcattttccgggcgtcgaggtcatgtcgcgcggcacgctattttatagcgattatgccagccagcaggccaaacatgatgtttccaccttgggttccgccacggtcatcggcgttttgctattgattctgggcgtgtttcgctctctgcgtccgttactgttgtgcgtgttgtccgtcggtatcggcgcgttggctggcagtacactgaccttattgctctttggcgaactgcatttaatgacgttagtgatgagtatcagcattgtcggtatttcagctgattacaccatttattatcttaccgagcgcatggtgcatgggcgtgaaacctcgccgtggcaaagtctgcacaaggtttttccggcgttaatgatggcgttggggaccacggttctggcctacctgattatgatgttggcgccgttccctggcctgcgccagttggcggtttttgccgccgcgggtctgactgcctcttgtctcaccgtggtgtgctggtatccgtggttatgtcgaggattaccggtccggccggtgccattcatgatgccattgatgcgttggctttccgcgtggcgcactcaacgcacgctgtatttaggtttgccactggtattggcgttgttctccgtagccggactgctacgcttgcagattaatgatgatattgcccaattgcaggcgctgccgccggatattcatcgggaggagcaggctatcacggccttgactgggcaaggcatcgaccagaagtggtttgtggtttatggcgatacgcccgagcagacgctacggcggttagagcaatttgctccgcagttacaacaggcgaaaaaacagggctggctcagcggctaccgtttgctgccattggcctctcaggcgcagcaacagcaggatctgacgctgctgcaacaggttgcccccaacgtgctggcacagcttgataccgttgggatagacgggttgaagatcgatctcactccaatgccggtcacgccggagaactggctcaatagcgtagtgagtgagggctgggcgttgatgtggatgacgttaccggatgggcgtagcggagtattggtgccgaccgacggcgtgcaaaacagcgccgctttggcagcgctggcggccaatcatgctggcgtcagttgggttgatcgcaaagccagcttcgaccagatgttttctttctatcgcactatgctgggttggctgttgctgggagccattgtggttatcgccttgagttacatgttgcgcctgggcgtgcggcgtgggctggtgtgcgtattgccttcgttactttctctcggctgcgggctggcagtgctagcgtttagcggccactccctcaacctgttctcgctactggcgttagttctggtgctggggattggcattaattacaccttatttttcagtaacccacgaggaacaccgctgacgtcattattagccgtaaccgtggcgatgagtacctcattgctgaccttgggtatgctgatctttagcagcactcaggctatcagcagtttcggtattgtgctgtgcagcggtatatttgccgcatttttgctggctccattggcgatgcatcaacgccgtaaagggaagaaatcatgatgattttacgttgtatcttggctatgtccttggctttgatgctgacggcatgcgccactaaacccgcggataatcggcctcaggcctggttaaaaccgggcgtgaaggtcagcttacctgcgccgggtatcacgccggcggtgaatgaacaacagttgctgaccgccacggtgaaaggtaagcaacagtctttgctggtattgcttaatgcagatcggcaacagctttcgctggtgggattgtcatctctgggtattcgcctgttcaaactgacctacggtgcgcaggggatcgaaagcgagcagtcaatcgtgctacctgagttgcctccggccagtcaagttctggccgatattatgctgagctactggccgatttctgcctggcaagagcagttacccgcaggctggacgctggtcgacatcggatcccgccgcgaactgcgtgataagcaaggaaaacgggtaaccgaaattgtttatatgaccagcaaaggcgtgcgtcagccgattagcatccgccagtacgtttttggttatcagatcgcgattcaacatctggacagctaacatgatttatatttctgcggtaggcatgctgaacgcgttaggaagcaatgccgatcagattgccagccagcttcctttgggcatcgctcccggcatgaagccgcgcgatggctgggttcagcccgaacaaccctgctggttaggcgccgttgaaggtgaactaccggaaatcccggcggcgcttgctatgcatcgcagccgcaataatcaattgttattggcggcgttggagcaaattcgtccacaggtcgatcaagcgatagtgcgctttggccgcgatcgtgtggcggtggtattgggcaccagtacttctggattaaatgagggcgaccgacaggttaaccagcgcagtcacgacgaggaaagtgacggctatgattattatcaacaggaattaggcgatccggcacgttttctttcggcctatctcgaactggagggccccgcgttcaccttgtctaccgcctgttcttccagcgccagagctattatcagcggccggcgtttaatcgaagccgggctggcggatgtggcaattgtaggcggcgcagatacgcttagccggatgccggtcaacggttttctcagtcttgaatcgctttccactcagctttgccagccttttgccgccgaacgctgcggtattactataggtgaagcatcggctctgatgctgctcacgcgggagcctcacgagatagccttgctcggagtcggtgaatctagcgacgcatggcatatgtcggcgccgcaccctgaaggcgaaggtgctattcgcgccattgaacaggcgttggacgatgcggcaattcaacctcaggatgtggggtatatcaatctgcatggcaccgctacccggctcaacgatcaaattgaggctaaagtggtcaatcgcatattcggtaatggcacgccctgtagctcaaccaagcatttaaccgggcacacattaggtgcggcaggcgtgtgcgaagccgcgctgtgctggctgttattgactcgtgatttacccttgccggcacaggatttctctcattcaacgccggatgacagcttgccgtcttgtgggttactgctagagcaggagccattgatgaaggcaattgttatgtccaattcatttgcctttggcggtaataatacctgcctgattgtggggaagcgtcatgcctgaatatttaccggcgggagattatttgcctcacgcggcgccgatgatgctgctggatgaggttgtcgcggtagaagcagaaagcgtgcattgtcgggttaaagtcacagaacagggcgttttagctcctttcctcactgccgaagggcatttgcctggatggtttgcgttggaattgatggcacagaccgtcggcgtgtggtcgggttggcatagccgccagcggggcgagcgggcggcgaatttgggcatgttgctcggcgcgcgtgcgctacgcagccagactcggttgattgaaaacggaaatttattggatatcactatggtcttgctaatgcaggacgaaaaatttggcagctttgaaggtgaaatcagctgtgcagggcaggttttggccaccgcgcggttgaatacctatcaaccggatcaacaagaacttaaacaattatttcaacaggatgaaatggaatgacacgttcagttttggtcacgggcggcagtaaaggtattgggcgagcgatagccctccaacttgccgccgatggatttagcgtggccgtgcattatcacagcgatcttccaggggctcagcaaacggtagaacagctaactgcgcaaggcggacaagggcggattatcggttttgacgtagccgatcgtgatgcgacgcggcaggccatcgagcaggatattgatactcatggtgcttactacggcgtggtgaacaatgccggaatagctcgcgacggcgcgttcccagcgctcagtgaagacgactgggacagcgtgatccataccaatcttgacagtttttataacgtcatccatccctgtattatgccgatgatcgggttgcgtcaaggcggcagaatcatcacgctgtcgtcggtttccggtttaatggggaatcgaggtcaggtcaactatagcgcggcgaaagcgggcattatcggcgcaaccaaagcgctggcaatagaactggcgaagcgcaaaatcactgtcaactgcatagcgccggggctgattgataccggtatgattcagatggaagaagcatcgttaaaagaagcgatgaatatgatcccgatgaaacggatgggcgccgcagaggaagtggccgggctcgccagctatttgatgtctgatattgccggttacgtgacgcgtcaggtgatttccgttaatgggggcatgctatgacccgccgcgtagtgatcaccggcatgggcggcgtaactgcctttggcaatgactggcagagcgtggccgctgggctaaagtctggtaaaaatgcggtacgcagcatgccggaatggcgggaatacgcgggattgaataccttggtcggcgcgcctattgatgatttcactttaccggagcattacacccgcaaacgcattcgctcaatggggcgagtttccctgctagcgaccagagcgaccgaactggcgctgattcaggcgggtttgatcggcgaagcggtgctaaccaatggtgaaaccggcatcgcctacggctcttctaccggcagtaccaaaccggtcagcgaatttgccaccatgctaacggaaaaacacaccaataatatcaccggcaccacttatgttcagatgatgccgcataccgcggcggtgaataccgggttgttcttcgggctgcgtgggcgagtgattccaacttctagcgcctgtacttccggcagccaggcaataggttacgcgtgggaggccattcgccatggttatcaaacggtgatggttgccggcggagcggaagaactttgcccgtccgaagccgcggtgtttgataccttatttgccaccagtcagcgcaatgattcgccacacaccacgccgtcgcctttcgatatcaatcgagacgggctggtaattggcgagggcgcgggcacgctggtgttggaagaattggagcatgccaaagcgcgagatgcgaagatctacggcgaagtcgtggggtttgccactaactgcgatgcggctcacattactcagccacagcgtgaaactatgcaaatttgtatcgaacaggggctgcggatggcgcagttacaggcggcggatatcggttatatcagcgctcacggtacggcgaccgaccgtggcgatctggctgaaagtcaggctaccgccgcggtgtttggcaataatacgccgatttcatcgctgaaaagttatttcggccatacgttaggtgcctgcggagcgctggaggcctggatgagtctggaaatgatgaatgaaggctggtttgcgccgacgctcaatctgactcagcccgatccggcctgtggcgaacttgattacatcatggggaagccacgccatattgataccgagtttttccaaagcaacaactttgcctttggcggtatcaacacttcactggttttccggcgctggcgttaatcgatgatgcgcatcgctctggctcgaatcagcgatctcagccaacctgctgtcaccaccgattggttgtcgccggagttactggttcaggctcccagcggcaaacggcgggaggcgtggctggcgggaagagtgttgctggcgcagcgggtgggtcagcgacctctcagggaaatgatcattgaagcatcgggaaaacctgcgtttcggtgcgatcaattgccacatttcaatatcagtcacagcggcgattttgtttttgtcgccgtgagtgataaagggccgattggctgcgatattgaagtgatcaggccgcgaaccggtgcgatagagattgcccaacactatttctgtgaggctgaatatctgtggttggcggcgcagcctgccgaaaatgtcatgatggcgttttggcgcttgtggaccgcgcgcgaggcacgattaaaacaacgcgggctgagtgtttggcaaatgcgttcaatagcgttaaagcccgaaacattgggcattgccggcagcgaaatttatcattggtatcagcaagggttgagcatggcggtcagttgctgtccgtcagaaacggcaaacagcgatctcaccgtggataaatgagcgtattcctgacatttatcagattattaccgatgaacttccccacaaagcagcaccacatccgggcggcgctgatggattttagccgccacggcaaggcattcctgacgggtaggatatatatcttcagacacgggaagcgcgtcacaagcatctattccgcatgtgctgaccagtagaacaaatcctataagcatatatcccccttattcttcaaagtatagcgcgcttatcttgcgagtatagaggttttgttgtggcatagcgctcgctttaatcataaaaaatgccttactaacaaagatttccacaatatgccgcgcacggcgaattccacatggcgtaacccgctcttgggggatgttatgaataatcatattggcagccattagcgcgagacggcagtggaaggatcactctgtctgctattgagggtccatcgtctattaggattttctgctttgtatttatgccgtcaccatattggctattgtaagcgtttcattttcatcttcaccgctatgggatatcacctatgggtaaatcatcgcgtatatattctttaaaactttagttggccttagagcggagtgagcgcgcgtgtctgtggtggtaaaaagagtgaaaaggattctcactagttggagatatgtctgaaaaccattaataagataagggtttgagcttaaaacactaacgtaatggagtacataccaatgaaaggtaagttgctattagcgatattactgagcgcgagcttttcgcttcaggctgatgaaaccagctcttggactgatgaaggtcaaccgtctcctgagcatttggagatgcagaaacccgaatttcatctttgtcaggatggacaaaaccagtcaccgatagatatccgtggggagttaagaagtaacctggcaccgctgaccatgcaatattttaccacgacgctgaatatcgtaaataatggttatacgattcagttgaacgtacccaaagggaataaagtgcagttagatggcgaaacttttatgctgaaacagctgcatttccatgctcccagtgaaaataccataaagggtaagcaatatccgatggaggcacacttcgtacataaaaatgagcagggagaattgctggttgttgccgtgatgtacaatctgggcaaagaaaatatggcgctggaaaaagtgtggcagcaaatgccaaaaggattgaatcaggaacagaagatcaatccagcgttggatctcaatggcctgattccggacagcaaatattattatcgcttcagcggctcgctaaccacaccgccttgttcagaaggggtacgctggctggtgtttaaacagcctttaagcatttctgaaaaccagattacgcagtttaagtcggtcattcatcgcgataataatcgaccggtacaggagttacacggtagggttattgtaaattgatttctggatattttaatttttcagggaatctaaaaggattttcaataaaactgttaataaatcgctaagggtgaaaataaatctttatcgatatatttaatgtaatgtttcgtcagcgtaaaacagcgtgctttatttggtttatgctgacggaatcttattggatatatttatggctaaacagccagacgtctaaatgggtatttaatttatttataaataaggcttgattaaaatgattggctatgagtaaatagcgtcatcggtttggaacacagaccttatgaaagcagttttagtaaagcagttcacagtattagcgttatcctcaatagatacctcttcaccgcgaaactccttcttaagtgccccataagaaataactgaaagacagacctctcttgccttatggcagcttaaataaatgaaggaagtatcgctatgtctaatacaatgactggtttagtaaaatggtttgacgcgggtaaaggctttggttttattaccccagcagacggtggcaaagatgtattcgtgcatttctcagctatccagagcaacgattttaaaacgctggatgaaggtcagcgcgtagagttctcgattgagaacggcgcgaaagggccttcggcggccaatgttgttgcccttaaagacaggcaataacgggaagaggctttccgaccgcgatgacgggtttccctgagcagtgaaagccctctccataaaaagtattaccggtttgcagtaaagattatgtcagcagttttagttaagcagtacgtcgaattagcgttatccgaacgataccttctttgtcaatgcctctctagcgatgcccataactattaatatttctgaccgttacgccagatggcaattaaaaaacaaataaaggaagtatcgctatgtctaataaaatgactggtttagtaaaatggtttgacgcgggtaaaggctttggttttattaccccagcggacggtggcaaagatgtattcgtgcatttctctgctatccagagcaacgattttaaaacgctggatgaaggtcagcgcgtagagttctcgattgagaacggcgcgaaagggccttcggcggccaatgttgttgtcctgtaaagacaggcaataacggctaattatcggatagaaatccccggttttctatccgataaaaattgccaacaaaaaacccgccttgtgcgggttttctggttttataggaaattaaatggcctgcgctgacgatgtatatagctggaatagtggcacattaagattttgtagcagaaaccaaaaataacattgggcgctctttttcttcatccaatgccggttgttctgcaatttgctgcgccgtaggcccccattcttcaaggcgatgtagagtaaagccggcgtctatcaacagattaatataagtggctaacgtacgatgctgcttaatcactccgtctgccagccaattggtgacgcggttgccttcggcctgataatgattaaccggccatgatctttggcctttatcatcagttaaccaaccctgctggatcggtgcgctaaaaatagggtgttcggcagagaaaacaaatttcccaccgggtttaagagagcgaaaaatcgtgtcgaacagtgccgatagattaacgacataatgcaaagctaatgagctatagactaaatcgtagttattttccggtaatttaagttgttccagatcctcacggcagtagcttattttgctgtcgtcggtcatttcattggccttggccagcattttggcggaaacatcaatacctttaacttcccgagcaccttgctcgcgggcataacggcagaaccaaccgtagccgcaacctaaatcaataacgttaagatcgtgtaggtcgggtagcattttggcaatcgatggccattctggtgcgccgtttaacccctgagttgaacgattcaattgtgcgtagccagcgaaaaatgccgggttatcataaatattctgagccatatctgctccaaaagtcgttaggataaactgaagtttattattaaggcgtttttccagggcagtttaacaagaggattttaatcttaatgcactgcgccagtgggaaaataaggatagcgccgaaacagacggcgctatctgagtaataggctttttaggatttcagtagaggtcaaaagacgcaaactgaaggcttaccagccaaagcgagcgccaccgtcggtagagttgtcctgttgaccgcgttgttgaacctgctgcattcgacggtcagtctggcctttttcatttatcacatggccagaactcatatatttaccacgacattctgctgaggtcttatcgtgacactgatagtaagaatcagcatcggaagagcttgaacatccggcaactaatgtggcgcaagccagcaaaaaaactattttcaagtccattcatttccccttaaattccgtttaccttattgttgctcagtaaagataaatatatcagcaacgagaataatattacctccagtttgcattgaaatctattattgatgattagtaacggatttatctcgcggaactattacgctatttgaacgcgcaatcacagcccctatgggcacaatagggcaatatactttggtacgacgacattgacattatagaaaggggcgtttatgcaagtgagaaaagccagagtagaagaagccgaggcgctatgggcgctaagaaataatgcccttaggagtggctgtcggaacgtttatgatcaggccacgcttgcggcttttacgccagatgtcatgccatcgggatttcctccggtcatcatggtcaatccatgttttgttatagatgatgaagcagggatctgtcccgttggttcaggctttctcgatcttaaaaatcattctgtggaggcggtatttacgcgggatacctatcagggaaaaggcgtgggttcacggatactggacgctattaaacaggaggctattgcccgcggtattaataccctgaggctttcctcaacccccaacgctttggcattttatttacgccatgattttaatttgctgcgtgagggcgagtatttttcaccgtcagcgcaaaaatatttgcagtgttttgagatggaatggcggcgataaaaattgaattaagctaaatgctacattttgccctttgaacaggcgtttgagctagggagttaaattcctcagcgccgtgtctgtcactaaaaaatgtagagataaaggggtttaacactgccatatccaaaatttttattcttttattgtcaattgattagagcagttttggcagcagactggttaatcaactaatcatattgcttaaatagacaatttggcatatacactcacgcaattttataaattattaaaaattgctgagcgctaaggctgattgttaaatgaaaagtatagggatagccatattaaccgggatgttgacgttgggaagcggtgctcaggcagctgaaactcaatcttacttcttcgatggcaaaatgctggctcacccggttatttatggtgccagagaaggcaccgccgtgatcgcctttattaaagaggccaatggggttaacggatattattgtctgtgtgaggacgaagctaacccggatcctacacagcgtacgctggatcgttttggccatgccagtattgagtcggtctttttcttcgatatggataacgctggcccgctgaccttggtattaagtaaaaccggcaaggcctatcaattacgagcttatcgctattgggagaatggtcgcggttttgttaaagtcgataaattgcagtctgccctcgataagattatcagcaatcaaaaagcgccgacggcggtgatgattaaaaccgcattagctaaattgacgccattcgacctcgctataacttaccagccgaccggaattgcggaatttgacgcgatcgatcatttgcaggggaaattggtcagctactttaatgaagacgagcaacccatacctgaacctaaagatctcttctctaccgacgcggtattttataaaaaacataccagcaaaaagaagggcttttcctgactgttacttatatccgctgggtatttagcgaagaagatgcgcgcccaagttaccatattgccagaatgagctgggaagccgatcctaaacaatatcgcggtactgaagatggcccatatattgtctatcaaatgggcgaaattatgacacgcggacaatataaacaagggaaagaaaccggcgaatggagtatcaataacggcgaacaggagcaattattcggcacttatgtttacggcaaacgccacggtaaatggaaaatcatcgggcgtgaagcaagtcgcaccggcatgatggtgaacgacaaacgcgaagggcgttgggaaattagtgacggtgaagccagtgaagactatggcctaacggggttcgatacttttgttaacgatcggcgtaatggcccaagcgagagacagtttaaagggaagattactgagcagggaaactacgtaaacggtgaaaaagaaggtcactggcgaatgcccggagcagtcggcagctatttgcacgacctcagaaccggcgattggcttattttgaccgaagacggcggtcgcgaagagctagtgctgagcaaaggtcaaagggacggggcatatcgtaaatttgatgccaaaggccaactgcgggaatattctaattataaatctggtgaattatccggtgataaagaagtgtacagcgagcaaggtaaattactgtctcgtggtacttatgcacacggacaactaaacggacgagaaattgtttattacgaagatggcgtgacgttacgtgcagatcgtggatttttaaatggagaactgcatggctccttccgctataacttccctaacggtaagcctcaagaaattgctgattacattcgcggtagaaataccggtatccgtcaggtattcaatgagaaaggtgtattgctgattgaggctaacatttgccaattcagtaatggttttgaacaaagcggctattgcggacatcagcgcgaatttaaccccgatggcagtccagtgagcgataaagattatctgtggggacgtcagcaaactaataatagctggtaccccaacgggcagaaaaaagatgaaaccctgctaggtaaaaatgattcgcgtattcagactagttattatccgaacggtcagattgaatgtcgcgtccatctgcaaggttttgaagcttttgttctcgaggggaaagagtataaggataatcagggggctcatcgagagggcgaaaatatctgttattacccaaatggacaggtaaaaagccgcggaatctataaacaaggcgtggttgtaggggggtgcgaaacaaagtttgatgaaagtggtaagcaaatttcccccggcccgcaggggtgtcctaaacatacctgggtttacgaaagctaattaaagctaactattgatacgaagggcggcgtttcgcccaaatttgcctctggcatttatcttagcggtgatgccttatttttcgtggctcactgctaacggataccgagaacgaattcagatgaatggacactcctttgattgatcaaaattatcagcgctggttattgacgctatctgcgcctttggttgccctgaaccaggaacagggggcggcctatgattgccctaaattctatccttttgatactacggtagatttaaccgagagctggggcgtggataatcgcgaggaactgatcgctatggtcgttcggatgaccgatgacggccacgcaccacatttggcaggttattatcatatgtggcatcgctttagccatagggaatggcaggattacgtggctcaacgcaccgggcgagagcaggtttggctcaatctggtcgctgagacggcggcaatttgcggtgaaggaggaattcaggcctgggatttggctcgcgtcagttttttatgccgcattgggctgctcaaccgttggattaatgaagaggaaaatctgtggttccatacccaatttgcttcacgcgctaggcattattacggtgattgggaaagttattataacgcctttctgattggccgagcctattggttaacgcaagataacgacacgccggaaaccctgaattttgccctcagtcaatgcagcggcacggcggctagcatggagtatgccagcgaattgtatctcacccgaaacccgacttttaagcgccttccgtggcaaatcgaaataatcgaaatagaacgaccagaatctttacagggagtgaatctgtgatggagacaaattgctgggcactgctgggcgtggctccaacggaagatcaggagattattcaggcggcttatcgtcagcgtttgcctgacttccatccggaaagcgatcctgaagggtttaagcgactgcgtgcggcctatgatgaggcgcgccgctgggcggagaaaccggtgatttcccgttccctgtggaaccagaataatgtcacagagagtgaacaacggataagcgtcatcaataatgagtcagattctgaagaagatgaggacgacgacgacgatgagtttatcgatgaggattatccggcgattcaacgtctgctgagcgaattcgatgagctattagtcaatccgaccgagcgctatcagccggagagctggcatcgtttcatttatcatcttgatcaatacagcgtgacaatagtcgatcgtttacgttggccgctgttagggcgcgttcaccagggggctgcgctttccgctaactgtgtccggctgctggcggaacgtttgcaatggcgcaagaggctagatgaaatatcgttacaagctgcggctgatatggatgcatttctaaatcatatctatcgtgaagatatgttcgatttttccttgctgtcgtcgatgagtttgcccgcacaggtggaaactgtggtttatttccatcatgcgcgccagctttattgggaacagcctgccgcggcgttacggcgctggttgttgatgccggtagcgatattctggccagattgtcagcaattattacagcaaatggctcgttggttcagtttagccgaaatccccagcccgtggctgcgggacctttgtcaggcaaaactggcagaatctccgcgagatgcggactggctgtacctgtgcgctcgccatgccaatttactgggcgacggcgagcaggcgatagctcactggatggccttgtatcagttagatcaacatgctgaagccgagcagggcatgttgtcctggtgtcgccgcgagcagccggaaatgttgccattgctgattcaggcgttggatcgccccagttatccggctgatacctcgatggaaatcgatgacgatgagcagcaatatctgaggccgacccaatcgattcagacgcaggtgcgttggggaaatgcatcgcagctgacgttttctccgcaaggggaagcgctggtgaaatggaaatcgggcgcgcatcggttagagagtatgtacccgcatttgctgaataatcgcggtgagaatgagatcgaccgtttgtattggcacgccagcatgttagcactggggaacgaagcgttattacaggatattctggatgaaccgcagccggattcgccgctggcagccctgattttacatggattacagcgacaggctgcccaacgattggattggctaacacattccacagtgatcgccgggttaattcattggctgaatagtccgcaggatcaaccaatgccgtcaatattgggtcaggaaacggcgatccgtcagtgccaaatgtggttgtggcaatggcgtcatttacctgcgttgaatctcgcacatttatatgaaagcgagttgtaccagcccaaactggaaccgattaaggattggctcacattcttgtctacaatggataaaatcgagctacccgcgccgcaaaatatttctcatcgtgatgatttccgtcagggtatcttgctgatattgatgctgggatttgccgatgatcaaatggcgacgatctgtcaggctgattcacgccttctaccgccgcagcacttggctttttcgctgtttcgagcgtttaaacgagtcgatttgactcggggcaacggggttgagcagttaaaacatcagttacgcatggaagaccggctccactatctttgctggacgcatttgccgctgacggtggatgattatgtggctcactatcagtattgcgcgcacgttagcggttgcgatttttatcaggctaagtggcagtctctgatggcgcaatcgccgatgcctcataaatcattgctgtgggctttcttctcctaccacggtgtgcatgattatgtggcagcgttgcaagagcaacagacggaaacccgggatgaagcggcgtttaaaaaaatgatcgtggatatcacgccgccgcatctggaatctaaaacagcgttactgaaggaaaatccacgcttactgagtctggctaccggtaatttccgtttttatgacaacccggactatctgccggaacaatcattgagcgatgaatggctactttgggcgcaagatgaagaggaagatccggcgctgcgattaaccgccattatgttggtacaattagggcgagagcgtttagccggtttcaaaaatgcgccgcgtcaggtgagtcgcttttggcagttctggcgtttgaaaacgcgcctgggccgcggaggattagtgaagcaagtggcgggtggaaccctgctgattagcttggttggcgatatagtgctgctggatactttgcctaatacgttgctactttctgtcctgatggtgggaaatctgtttagcggtctgactcgtcgcgccaacgatctcaatcaggaatccccgcgccttcaggctttggtcagtatgctaaccctattcccgttgctgctgtttttcttcggtaaaagttatcctggatttacccatagcgggccgccagcgggcaatggcgaataaccgaggggaggcaccgtcgcaggtgcctcccgcgttttcgtctctgctatcgcggcatagggcttaagtcgcaattcgcttaagttacgatcggtttaagctacatatctcgcttgagtcctaaatggtttatagctgcatatcgtcgagaaactgttccaatcgttgacgaatcggcgcgataacctcttcatcctgcccggccaacaccgtctcgaactcccgtaaccaaatgccaatttgcctgcgcgggtcacctaacgtctgcgcccaggctttctcaatacgcgctaataacgcccgattgtgcagactgtcgcgaggatggattttcaggcagttgagacgttgatggctttcccgacgctgctgctctgtcagtccggttgggctatggtcgatgactttgctaaaagtgccgccgctgtctggaatattcacgtccacctctaacaacccgttgatatcgtaactgaagcgcacatcgagagattgcaagcgtccgttaggctgaactggaacttcaaactcatcgataaagatattgttatctacgtgaggactttccccttgataaatggcaatactgatggctttttgattcggatagcgagtggagtaagtctccacccgcgaagtgggtactacggtatttcgttccagaatcggtgagaaaataccgctgcgtttctcctcggcggtagcaatacctagggtgtaggggcacacatcggtcaaaataacttcttcgatatcttcattacgtaaacgacaggcggcctgcgcggcggcacctaacgccacaatagtgctaggatcgaggtgctgatgtggcagtttgccgaataaacgtaccacgagtttctgaatgatgttcatccgtgatgcgccgccgaccaacaccaaatgatccaactgctgtggctgcaaacgtgcatcgtgcaacgcctgttcgataggcgcccgcaggcgattgatcagcggtagccagatgtcttcaatacgtagctcatccagagccatacaccaatgcttgtcttgccagtgccagcttaattcgtagcgggccgtttgcccattgaactgatatttcagctgttcggcgctgtggtagaggcgagacaaatccgttgccggtatcgattcggcagacaattgccactctttcagcgccgcatttatcaacgcctgagtgaagtcttcgccccccagatagttgtcaccggcggaaccctgaacttcgatcagcggtaatgcgtattccagaacggtaatatcgaaggttccaccgcccaaatcgaacactaaagtgcgcccgtgattctgagtatgcaaaccgtaagccatggacgcggcggtcggctcgttgatcaaccgaaccgcattcagccccgacagctcagcggcaaaacgggtttgcttgcgctgttcatcactgaaataggccggaactgaaatcacaacgtcgctaaccggttggccgagatagttttctgcatcggccttcagggatttcagcaccagagcggacagttcgggcgcatcgaagttttgctgagccagtttgaactgctttttgctgcccatatagcgtttaaacactgaggctgacctttctggatgagtggtcaggcgagaaagcgcggcgcgtcccaccaaaatagagccgtcctcgtcgatactgaccaccgatggggtcaaaaactcgtttaaggcgttgggaatcagtaccgcttgcccctcttgccaaacgctaatcaggctattggtcgtgcctaaatcgatgccaatggctaaaggcgcgcgctgttgttccgtcatgttgattatctcgctgaaatattagcgttaaattcagggtgaagtttcgctgggcatggtgcatgcccagcgctgtgctgacaaaaaggggctttcgctaaaacggataaaaacttaacgctttttgaggaactgaatattctgtgccgttgtatttcaacagcatactgtttttcctcactttgacttctttatcgacacagttatcttcttttaataattcgctgcgacgggaagtggtgaccgaattgatttgcagatcgttaaagccgtgagtctgggttttagcgacggaaatcgtgcgtttatcttcggaaaattcaccggtacagttaccgtcccattcgccgctatattgatccatctgcaacggcttagttaatttattcagtttgccatcttgcaggttatataaggttaatacgtagtccgcgattggattaacgcgcgatgaaccgcgatggtaggtgcgtatgccgaaggcgcggttctccgccgttaattgatagcgtgcggtgtcaatgctaatgttatcggtataaatcgcatcatcgctgatggctttttgatcgtagcggtgagcgattaacttaccggtagccgaatcgaccactaatacatcgacatcataagtcggttgatcggaatactgttcgggaatatccgaaatcagggtcatcacgacaatagttttatccggtgcatagggccagactttacagatgttcaggtttgacggcgctagcgttaattccggatgtagtgttttcgccaattgaggaataaagctctggcagtccgccaacgaataagatgaaaacataagtgaagaaagaagaaggaaaatcctgcgcatagtctgagtccctgacgctagccaaataaaataggcaacggtagaaagagtgtggaaatcaccgatacacggtaactcactgaaataaggtaactaaatgctacctgtctatggattattacacggatagagagagttacctaacggcgtaattatgaaaggggaaatattttaatcgaattttttatgccagatggctgtaaaataatgcggtgctttattaaccagaatacgtcaggttgcgatctgaaatttattaaaaccaagccaaggttgggttagttagagtatttagctagcaataagctttttccagcgtcaagattgtcttattccgcaaggaaagacttacgtagagcagaaaactgtattagtgtgatgagcctgctgttagagcactgaattgtcacatttcgccgcccatttatcgggggcagaataactaacgtgccggggttacccaaaagcagaataacaatgttgctgtgcgaattttagcatgactttacttatcggttggtaatgggttgaagaaggaatctggcgtgacgaaaatacgggttggggtcatttttggtggcaagtcggctgagcatgaagtgtcattgcaatcggctaaaaatattgttgatgccgtagatacggaaaaatttgaagtcaccttgttaggcattgataaacagggccagtggcatattaacgatgcgtcgagctatctgttacacgcggaaaaccctgcgttgatcgccctgaatcactcgaatcaaaacgtcgctttggtgccgggccaacgacagcatcaactgattgatgcaagtaatgccgcagcgttgacgcaactggacgtagtcttccctattgttcacggtacgctaggcgaagatggctctttgcagggcttgcttcgcatggcgaacattccctttgtcggctctggcgtagtcggttcggctgccagtatggataaagacgtgaccaagcgcctgctgcgggatgccgggctgaacgttgcgccgtttatcactttaacccgcgccaatcgtcaccaatacacttttgagcaagtgcaggagaaactggggttgccgctgtttatcaaaccggctaatcagggatcttccgttggggtcagtaaagttcgtaatgccgtagaatttgcccatgcggtcgagctggccttcagttttgaccataaagtattggttgaatcggctattgttgggcgtgaaatcgaatgtgcggtattgggaaacgatcgcccgaaagccagcctgtgtggcgaagtggtgatcagcgatgaattttattcttacgataccaaatatattagcgacagcggtgctcaggttgtgattccggcggttctggagccacacatcagcgataatattcgcgccgtagctgtggaagcgttccgtactctggagtgtttgggtatggcgcgtgtggacgtgttcctgacgcctgataaccaaattgtcatcaatgaaatcaatacgttacctggttttaccaacatcagtatgtatccgaagctgtggcgcgccactggcatcaattctaccgagcttatcactacactgattgaactcgctttggaacgtcatcagcaggatcaggcgttaaaaagctcgatttcactgagtgaacaagcgaaatagcctctatttatttcacctatgatgatgtgcgataggtgaaatggaactctgtaaaaagctgcctggtgcagcttttttattgcctaaaaatatgtggacggtaattattgtcagtatttgacattatgtcacttaatgacaataattcagaaatgaaacttacagaagaccagctcttacttcgagagagcaaaaaaattgtcgaagccttaggaaacacttttgcgccgctggtggaattcgtgctgcacgatttaacccatccggagtacgccattgtggcaattgctaataatttgtccggacgagaagtgggggaacctgctacagaactggggttgagccgcatagccgatcctaactttcccgaagtgctccaaaactaccccaatcagtttcccgatggtcgcccagccaaaagcacctctatcggtttgaaaaatagcaaaggagagtttattggtgcgctctgcctcaatatggatatttctctgttctccgccgttagcagcagtctggcgcagctgacgcaaacgttgcccaatgacattcaggaaaatctgcaatccccgcgtttggaaactctgcgtgcgcgattggaacaattcgccacggcctggaacaccacgccacgcggcctgacgccggctcaacgccgtgaagtggttcggcaattggccaaggaaggattgatggatttgaaaaatgcgcaaacagtcgtggccaacaattttggggtcgcgcgctccacagtttatacctatctcccaactgatgaaggaagttgaaaatgccccggctcgcaattggatatgacgatattgtacaggcacatcaacgtattgccgatgaagtagtcaaaacaccggtattcacttctgccacggcagacgcccaaaccggagcgtcgttgtttttcaaatgtgaaaattttcagcacatgggcgcttttaagtttcgcggcgcttttaacgctttagcgcagttaacaccagagcagcgagagaagggggtcgtcactttttcatctggcaatcatgctcaggccatcgcactggccgcgcgaaaactgggcatccgcgccaccatcattatgcctattgatgcgccagcggtgaaaattgccgctaccaaaggttacggtggcgaagtcattctctacgatcgctataccgaagatcgcgatgcgattggaaaacgattggcggctgaacgaggtttaacgctgatacctccctatgatcatccccatgtaatggctgggcagggcacggcggcgaaagaactgtttgaggaagtgggggacctggatgtactcatcgttcctttgggcggtggcggtctgttatctggctgcgccacggccgccaaggctttgaatccacactgtttggtgatcggcgctgagcctgaagcgggtaatgacgggcagcagagctttcgcagtgggaaaattgtgaaaatcgctacgccgcacactattgccgacggtgcgcagacgccatttctgggaaactatacttttccggtgatacaagaacgagtggacgacatacttaccgccagcgacgctgagttaattacaaccatgaaatttcttgctagtcggatgaaaatactggccgagcctacgggatgtctggcggccgctgtggcgtttggggaggcgctggacctgcgcggcaaacgggtcggggtgataatttccggtggaaatgtggatctcagccgctttgcccacttcatccagcaggaaaattaatctctgatattcacctgataaatcttaatagaaatccgccgccaggccatgacagccacgtagcctgcgccgacggccgggcctatcttttcggccagttgaccataattgctctagggaaaccgttgacgaatcagccagttgaatctcagttggcacaggtattcgacaatatagatcgcgtactgcttagttgtggctgcgattgcagtgcgttgatacggattcgggggtatctgaacgatgaaggattgtgcttgcaattcaatcaattatacgctcattgtttaggggaacatcggtcagtgcgttgcgtagtacccgtagccgaattgcactatggattaatggtcgaaattaaggccattgctcaataagtgcactaaatattgtacctgtttataaataaggttgggcgccaggcgcagatgagtaggactggcatttatctttatcatcattttattttatctatcatctgtttttccatagtagacggcaaaacagatgcctctccccgagtctttatctctaagatttttatcgtcagttaatttataaccaattgtaaataaagctatatttttttgtttttttaatggctggttatgatgaagtcgaaaccctttaattttgactgccctcaatgaagaaaatagagaaagtttcattagtgtaactaaagtgtttattgcgggttacaatcggagctgcaaacatgatgctggtcatcatttgcgcatttcgcattattttcctgttgtattttatccaccatataaatgctgtgcatatatacagtatattgctgtacacataatgaaaattaattcaaggatgagtaatatgaaaacttcaacaaaaacacagtaccctattattttagtacacggcctatttggttttgacaaaatgctgggctatccctactttttcaaaatccagccagcattggaagttgccggtgcacaagtgttcactgcgtcagtttctgcaaccaattcaaatgaaacgagaggtgagcaactacttgattttattcgatatattttgaataaaaccggagcgaaaaaggtgaatctcatcggccacagccaagggcctttagcctgccgttatgctgccgcgatgcgtcctgacctggtggcgtctgtcacttcggttaacggtgtcaaccacggttcagagtttgccgatcgggttcgtgaagcctttgtcgaaggtggcctgcctgaatcagtggctaatttggttgtctctacattcacaaatttaatgtctttactcagtggtcatccagaactgcctcaggatgctattgcgtcactggatgcattaaccacgaaaggcgttacggaatttaacgccaaatatccgcagggtctgccagagaaatgggggggcgaaggcaaggaagttgaaaacggcgttcattactattcatggggtggatttatccaaggagggattcttgagcaagggttgaatacagctgatccactgcatatcgcgatgcgcgttggttcacaattctttattagagaggcagaacagaacgatggcatggtagggcgttttagtatgcatttaggtaaagttattcgttcgaattattcaatggaccatatggatgcggtcaaccaaacggctggcgtagtgccagtgcatcttgatccggtgaaaatgttcgtcgaccatgcagcattcttaaagtctaagtctctgtagtccacttcgactgagatgaaaaggggagcgttgttgttaagtcacgcaacctgattagtgacgttgtaacctaatcgctcaactattcaactcaaccataaaagagaaataacagagactcccctgcggccgagaaggagtctctgaaaacgattacaggtgttttttcgcgaagttaacaatatcttgcttaaagtcgctgaccttcttctctggtgatttcttacataactcaaccaccttcggcgttacaacggtatcaatttcttgatagtcaacgaaatcgccttttttatattgcgtatcgtcattcaacatccagaatacgaccggagtgaagcttttcgggttcaggtcgataaactctttacagctcatatccgctggcgtagtcgggctggtagcggcagcaaatgacgcggtggctgcgcacagcagcaaaccagccaatgggatattacgtaatgatttaaatgacatgcctatctccttgcggtttcggatcaataatttccaatataactcaggttctggtttatatttcgagtctaagcatggaccaataatttaaattaggccagtaattcacttaatttatctgttgcgccattcgactacttatcctctacagtaaatattcaatttatagttatgcgtcgatattatattaattcgcatggttattattgggtttataatttgatttttatttgaaattggctaggagattatttttatttgttagtaaggcttattacgttgttttcagtgtgatatttaattcggataagcgtaatgccaggctccggatgctattattttacagtttgaactgaggtgagaatagcatggggtgggaaacggaagttctaaatttcaataaacggactaaaggtaaatcatgaataaagaaaaaccaaacatggcactgatatttatcattttacttacagtgagaattcatgctgaggctcacaacattaataatgtcatccctcgttctgataaccgagaacacttatcatcgcgcgtattggaagaaagtaatcaggctgtatctctctataatattggtagcggcacgttggtctacagttccgaatacaaacaaaaagaatatctatctgctgattatgcatataatcttaatggaggatggaaagaaaatgcaaactggaaatatatttataataggaatggtacggtatcatttaaaaatagatactcaggactatgcctacaatattacgggacagaatatcaggtcattgaagatacctgtgatcccttattgagaactcagcaaatcaatctggaactggtcagctctggcggaatgcttatgcggtttaatagtaataatgaatgcctttatattcatcctggcatcagccattactatgtatacagtgataaatgcgaagagatcaatttttatcattactggaccatcgtacctccgctcaataactgagtgaatccacagggagtgaataatgaagagtgttttatctaggatgtttgtgtttggaggcttgtattggtcaacgttattatcagcctcagtgacagactaccaattagcgacctggaatattcaaggcgcgggcagcggcgcggccagtaattctaaatgggttagcggcattgccaatatgtttttgcgtgaaaatatccaggttgttgccattcaggaggcgggggccagaccgccttccgcatgcccttatcccagtccgggaaccccaggaggcattgatttacaacgaatcgccggcggggcaccaaatagagtcaatccacaacggcgtggtgtgatctccgacgttgaagaatcgctctggcaacccggcggacgacgtggcggaaatatttatatctatcatatagatcatgataccaacgcgcatcgggttaatattgctattgcctcgcggattcgggcggatgaagtccttattattcctccgttggaaaccgggcctaatgcacggccaacattaggcattcgaatcggtaatgactatttttttagccttcacgctggagcgcatcaacataatgaggctgcgatgattgtgcaattcattgataactatatggctaacagcgtattaccgcggcgtgcggaggcaacttggatactcatgggggattttaaccaatcgccggatagtttacgcgccagcttgtcattgcctggcactacgatgctgaatacttaccacgttgttgatcccaatgtgccaacgcatcagggggggaatacgctggattacgccgtgctgggggctgcaaccggtacggttaggctgtttgccgtcccgcttatagctgcgatgatgacttatatgtccgatcacattgccgttcgatttaatcaataataccgaattaatacacaagactgttcagaaaggcgcttagaatctatgggctaatctactttaatatgacggatagccctttttttaaattgagagtaacggttgttaaagttaataatgttggatttacgaaatatatcactactgtaatgtttaatgctgtaattaatactaaaaatttctcaacaatacttatttaaacaaagtgtagtaataatggcgatggaagaataggttacgttagaccatttaaaaagtaaggcattagcttgggtgtaacatattgattatagctatcatatttataggtaaaaacaattctattatttctcacaacttaccttgttctcagcatccctttgggttctataaaaaaacagtcacctatgctatcatttacagtaattatcattaataaacttaatgaaacgttattgttttatttacatctttaaatataggtgagttaattttatgagtttacgttatttttaccgaaatagcctgcggctcttcgccaggagattagcgggcaactatcgtaaaagtgatcgatctcataaacatgccggtaatgatcaactgattaatctgcatttggaatcactgcttaatgctgcaactcaggtagcgattatcacgaccgatctggataatcgtatccagattttcaacgctggcgcagaaaagatgtttggctatgaaaaggaagaagttttaggaaaattagcgacggaggttatctatgtcgactccaacaaagccgagcaaagctgcgtaaaaaatctgttgaagaaccaacctgaatcaagcgaatggctttatcgacgcaaagacggtgatgctttttggggcgatttaagcatacacgttattaataatgagtataaagagcccattggttatgtcagcctgatctcagacatttccgagcgtaaagagctattgataaagctggaaaacagcaaaagaataatggacaagttgacgcgaaacatcccagcgatgatttatgcctatcatctcagtgaagcgggagagtcttattttaagtattgtagtgacggtatccataaaatattcgggttgtccccagaacaggtgacgaatattccgaaacaagataatccgatattctcgctgattcatcctgaagatatggccatgctgcaagaagaagtcatggtttcacgccgtgatttatcggtttggcgctgtgattttagagtcatattgccggataaaggaatgcgctggcttcacggcgaatcttttcctactcgtcatgatgacggatcgacgatgtggtatggctcgtttttcgatataactgaactgaagcagtctgaatcaattttaaaagccttagcgcagacggatgtgctgaccggcgtttccaaccgtcgtcatttcgatgaggtttaccatcaaacctggaaggtcagtcaggtatccgaagagtctctttccatattaatgatcgattttgataacttcaaaagctttaacgatcagtatggtcatgctcgcggggatatttgtttaaaactggtggtggagaccttgtcttctttcatcagagaaaataccgatatgattgcgcgttacggcggggaggagttcattgttctgctatcaccaagcaaccatgacgaagcgcttctggttgctgaacggatgcgcgattctattgagcggttggatattcctcatgcgatgtcgcccaaaggtaaggtgacgatcagcatcggcgtggcgacgatggttccgaagaaagagggattatccgccagcgatatgtcggatattgcagataaagcgttgtatcgggcaaaacaggcgggtaaaaatcgtgtggaggccgtgtcgctctgaggcgaactgaaaatgcgaaactggcgttgcgtcaggcggagagaaaatatcggtttgagggaaataaatggcagagcaacagggagtgctctgcccgtggtattaatcaggatcctgagcggcgcgcagacgttcctgctcttctgcaatgaccgctttaatttcttccagcactgactcgacatccgctgcctgagtactttctgcaaacactccggttagctgagtgtcaggacgaagtttgccatcttcatacagcgcccacatttctttggcatattttcgccctaataactcaggcgcatactggccgtaatagttggtcatgttggctacatctcgttccagcatggatttggcatggttattggcagcggcgttaacgacttgcggtagatcgatgatcaccgggccttccgcatccattaacacgttgaattcagacaaatcgccatgaactaacccggcgcacagcatgcggaccacggattgaatgatcaaggcgtgatcgtgcaccgcctgctccggcgtgagaggaacatcgctcagacgcggtgcggccgagccgttttcatcggttaccaactccatcaacaatacgccgtctagacaggcatagggctgaggaacgcgcacgccggcgttggctaacacatacagagcgtcaacctcggcggtttgccaggtttcctcttgctgcttacggccaaacttcgagcctttcgccatcgctctggcatcgcgactgtttctgactttgcgaccttcctgatactgtacggcctgcttgaagctacggttttcggcttctttataaactttggcgcagcgaatatcggagccgcagcgaacgacatagacgtcggcttctttaccacttttcaaacggcggatgacttcatcaaccaagccgtcatcaaccaagggttggattcgttttggaattttcatggcgtccttttaccctatttaagcccgcgatggaatggttttggtcgaattttcctccagtttaccatccgccatctaccgcaggtggtatttaggggatcaggccgcgttaaattgcgcattgtacaatcgggcataggcgccttgctgtcctaaaagctcctgatgattgccttgttcaacaataccttccttatctaccacgatgattcggtcggcgttttgaatggtggccagacggtgggcaatcactaacgtggtacgaccacgagatagctcaatcagcgcctgctgaatcgcctgttcggtggcggtatccagggcagaagttgcttcatccaaaatcagaatcggcggattttttaggaagattcgcgcaatggaaagacgctgtttttggccgcctgacagcttgacgccgcgttcacctacccgcgtgtccagtccatcgggcagggcgttgatgagttcatccagtttggcctgttgggccgcgagcatgatttcgtcatcgctggcatccagtttgccgtaggcaatgttttctcgaatggttccgccaaacaggaagacatcttgttgaacaataccaatgttatgacgcaaggattgctgcgtcatagtttggatatcaataccatcaatggttatcaaacccgaatctatctcgtagaaacgtggcagcagagagcatagggtcgttttacctgcgccagacggcccaacgaaagccacggtttctcctgcgcgaatacgcagattcaagccggtaaagatagggctttgtggcgtataaccgaaagtgacattgttataacaaatatcaccttttaaatggccaacctgctgtgcatctgggctgtcctgaatgtctggtgcagtatcaatcaactgggtaaaacgtttaaaaccggcaatccctttcggatagctttctaataccgaggtgattttagccaccggccggaagaagacttccactagtaacaagaatccgacgaaaccgccgtagctcaattgcccctgaatgacgtaccaggtgccgaaaaccatcacgatcaactgaaccaaacgggtactcagatagctgagcgtcatgctggtggtcataatgcggtaagcacgtagcttggtggtacggtagttttcgttatctttagcaaacagtttcttttcgtgagactcatttgcaaaagccttcactacgcgaattcctccgatgctttctccgattcgcgcattaaaattgcctacctgaccaaatagttttctccatgtatcagtcatttgcgaaccatagcggctgaccatataagtcatacagggcacgataacaatggtgatgagggccagaggcagatgcaccatggccatcaggataaaggccccgataaaggtcatgattgcgataaacaaatcttccgggccgtggtgcgctatttcaccgacttcttctaaatctttagtgacatgggtaatgatatggccagtttttgtattgtcataatagcggaaagacagtttttgcaggtggctaaacgcttgtcggcgcatatcggtttctataccaacgccaagcgcatgaccccaatagtttacgacggccatcaaagcagtattcaacaaataaattaagagtaagccggctgcggcccatagaatcaatgaccagttctggtccggaagcagtttatcaatgaaggttttgactgccatagggaagcctaactccagcaaaccagccagaatggcacaaccaaaatcgaggaggaaaagccctttatacggcgtgtagtaagcgaaaaaacggcggagcatcaatgcttccttaaagtcggagagagacaaatgggtgagttagtgaataaatggctcattaccagttcgcagcataataaatttaaatgattattaatagcatcggttcccacagatggcaggttagacggaaagcgtggagttggatatgctagccgggcagacaaaaaaagaactgggtaatactgccgcgtaacccgatattatcgtggtggttacgcgatggaatcattaatctaaactgcaaaaaataataaatagaataggaagttcttatttgcttcccgcccaactgtaaggctcaagctctacgtttaacggcggctgggctaagttattggcaaaattagccaacgttgccaggcttacgccgaaaatgacttccaacgcattctccatattgtatccggcttgtaaaaatgcctggtattcaggttcagagacatttccttggctacgtataatggcccgcgtaaatgcggcaatcgcgtttaaacgatcatcggctaaattatcgccctgacgtaaagcttgagcaatatctggggcaagcaaatcgtttctatcaataaccgcgcagtggccagccacgcaaaaatggcattcatgagccgtagctgaagctaatttaaccacttcgcgttcgctttgattaaggtctgcgctgccgttgacagccgacatttttgtataagcattcaataccttgggcgcatgagccaaaacgccaaataaattgggaataaaacccagctcattatttacatgttcaaatatagggcgattttctcggctgacggttttaatggtatagggtgttaggcgattcattattggcctcctgtcgtctttcagatctactatttttcacatctactaataatagatgaagaatgccggttctttttttaaataaactacatatagcatttttagattgttttagttgtcaagctattagcctattaaaagtcacctgatgtgattaaattttgtcggcgaaactattaattaccataaagtgcaaattagatgactatcgtcacgcattggctcatttttatccgttgcagattcttccggctattgagtattgttaatgcccaatgatcaggagctgaataatgaaactagaattaaccgatgcaccaaaacctgaagatattgaggctattagtgacggtttgagagtttttaatcgacgttttgttggtgcgcaacgcagaaatcccttggcggtatttattactgatgacaatggcaaaaaccagggcgggctgaccggttataccttaggcctatggctaaatattgaaatgctgtgggtctccgatagtgtgaggcactctgggatgggcaccagattgattcaaatggctgaagaagaagcggttaaacgaggttgtcagttttctcaggttgatacttttagcttccaggcgcgaccattctacgaaaaacagggctatcagctacaaatggcgttaaataattatctggatacccatcatcgctattatctcacgaaagcattgtcagttagttagggtaaatcggttgagtatccgaaatatgtttttggcgtaatgatcgtgccgacagggatcaaaacgataacctttgcgcctcatcagaatcgaaaggttatatacggtaagtgatcccgtcggcattggggggaaatgcagctactatatcgacagccttatttgttcgataagtcgtaatgctgattcttagctaacttaagactggggctgcgctttatctatcatatggaaatcgcgtagagcaacgtagggatcccaatattctttgacgttttttaactgaccgtcgggtgaaaccgtcacaatactgataaagttctggtgataaggctttttatggtttttcgattttttatcttcagatgtagcggaacgaataaaacctgaactgctgtattcgaacacgtagactccaggtttatctgtcgctaattgggtccaggtttgaggtttggaataacgtaagtcctccagataggcacttattttagtgaaataggccgtcatcgcttcgcggcctcttgaacctcgcgaaaatattgggaaatcatccaccggcgcataaaccaattcgaactctccggcgggcgtaaaatattttgcgacgttatccggattttctgaccaacgattcaggctttgccaaaagaatatggcaacatcttcagtgctatagcctgggagcagatagtatttaccctctttacttataatatgatctgacagttgttgtgcggccagggcggtagaactggctgatattgcggtgaagatcaataaacattttattagcttgctcatgagaaaccccactattttgtttagacagccagatgctgcatttttattacggctttaattgtgctgccagactgagagtcagccatggcctgattaatttgatccagggcgtaaaaacgtaccaatttgtcgacaggaaagcgtccctgctgaaataggctagccaatcgcggaatgaatgatatcggtgcggcatcacccataatggaacctcgaaccaaacggccacgtagtaagtgcataatatttaatggtaaagtggcatttggtgcgaccacgccggtcaggacgcattggccgttctctgccagagccgcaattgcgctttccatcactgccgggctacctgcggcctccaccacgtagtccactcctcggccatcggttagttcttgaagcagcattgggaggctatttcgcgtgcgatcctttgaggaatcgatactgtgagtggcgcccaggctttttgccagcgtcaaccgattggctttgatatccacggcgataattgtggtacagcccgctaaaactgcggccatgatagcggcaagcccaacggcttccatcccgaaaatagctatcgaggaacccgcctcaggtttcaggctatttaagacggcaccggcgccggtcatcatcccgcacgccagcggccccaaatattccagaggaatggttttatccacgggcaccacgctgcggacatttaccgtggcataattggcaaaagacgattggccgaaaaaatggctatgaatggcttcgccactcgtggggtcttgtagcgaaaccgatttatcgctgcgactggcgtgccagttaagtggccaatgttcacggcaataggtcggtaaaccgatatggcatttttcacattctccgcaggaagcaagcgaaagcacgacgtgatcgcccggttggatatgcttaacaccagaaccgacgcgttcaacaatgccagcaccttcatgacctaaaaccgcaggcagaggtacattgatcacttgttggtgcgatgcaatgtcggtatggcacaggcccgttgcaataatttttaccagaacctcattctctcgcggttcctccaaccttaattggcggatctggagcaaagggttactctcaacgctaacggctgcatgaatattcatagtgttattcctaggtcatcaatatctgatcagaatctttccacgtatgccaccttggcgtatttgctccaacgcggcgggcacctgctctaagccaatagttcggtcgaccacgacctgcagcgtgttgttcgccagtttttccattagcaggcgcaggtccgatagttcgggtttcatctctagattcaccaggcgaatatgctgggacatcttgagtgacgcggaacctatggtactgatagcggtaccctgcggctttagcagaggaagcagctgagcaaaggcatctggagggtttacaagatcgataattccgtcaattccgttggtatagcgcagtaaaacttgggtgttaaccgaactcttatggcgatcgataacattgcaggcaccgagtttatgcaacaaagtcgttgcctctgtagcggcaacagcaatgactttgtaaccgacctgagcggcaaactgaactgtaaacgtgccaactccaccgctggcaccgaccagaagcacgcggctaccggagggaagattcaatgtgttaacggcctgccaggcggtcattgcggcaataggtaatgctgaagcttgaaccagatcgatcagattattaacccgcaataacatcgcatcttcctgaatgacctggtattcagcgaaactcccgtgaccaatttgatgatgtaaaaagttgccgataaccgcatcaccaaccaaaaattttgtcacgccttcgccaacggcttcaacaatacccgagccttccgcacctaaaatcagcggaaaatgatggggctttttgccatccaaaaaccctgtagcaatgcgccaatcgatgggattgagactagcggctaccattcgcagcagaatttcacctggggctggagtgggtttatctagcgtggctagtttgggtgtgtcagaaaatgaatcaatcataaccgcttccatagcgctctcctttcgactgcgacgaggttttttatggtaaatgagtatatttgctggctaatcgcggcagaagaggggtaaataggaaggactgtctcgatttttaggataatgcaatgcagaaactgatgaatctggatttgaacgatctgtattacttcacctgtgtcgctgaatttggcggttttagcgccgccagtcgcgctttggggatttccaaatccagactcagcgcacgtgtgttaacgctagaaaagaatcttggcgtattgttgtttcaacgcacaaccagacaggtgcagttaaccgaaattgggcaaaacattctggaaaactgcaaggccttggtcgcagaggctgaagtggtgcaaggcgttgtttccaattcgcgggccgaggtcgcggggctggtacgggtcagttgcccgccgctggctgcaagacttctgctagcgccttatctatccgattttctgcagcaataccccaaggttagggtgcaattggtcacttcagatcaacgtttcgatcccatcagcgataatctggatgtattaattcgcctgcgcgctgcatcgcaaatggacgaaggattggtctcacgcgtactgggtcacagccagcgtattctggtcgcctcacctgattatcttgctcaggccggtgctttgatggcaccagaagacctgattaaacaccagactctaagcctgattgattcagagtcggtacaacaatggccgctcattggcccggatgacaagttggagaatattcagattcagccccggctaatgtgcatggagtggagcgtcatgctgcaagccgtttgtcagggattgggcattgcttctgtgccggacatcgcctgccaaaaagagattgccagcggagctttggtgcgcgtgttaccgcaatgggcttcaaatccgctagtggtgcatgccgtttttcctacccgacgtggaatgctgttatcggtgcgcgtatttttggactttctgattgccactatgcctagggcgctctcagctgataagtaagttgtggggtagcttcgtgcgctctccgacgttactgatatagttaatgataagagttctgtctattacgttagccagccttaatgcaggtatacctatatgtcagcttcgtcaattaaaaagctatctctgtggtcgttaacgtctttggtagtaggatcaatgatcggggccggtattttttcgcttccggcgacgtttggccgagctaccggcggtttaggggcaatgattgcctgggtgattgccggtggcgggatgttaacgctggcctttgtgtttcaaacattggcgcagcgtaagcctgagctggattccggcgtgtatatttatgcgcaaaaaggttttggtgattacgctggatttgcttccgcgataggtttttgggctggagcctgtattggcagcgtgtcctattttgtactgataaaatcgacgctgggggcttttttccctttattaggtgacggtaatacgctttcggcggtgttgattgcttccttaatcctctggagttttcattttatggtgctgcgaggtgtgaaagaagccgccaccattaataccatcgcgacgttcgctaaagtcgttcctatctttatttttattgtggtactgattttcgcctttaacagcgatatttttatgcagaatttctggggcgcgccggtgccgtcgatgacggcagatatcaaccattgggataattacggttatgtcggccatgcggccacggaaatagacgcgtcttcaacctcattatttactcaaatacgtagcacgatgttagtcacggtatttgtttttgtggggatagagggcgccagtgtttattcgcgctatgccaaagaacgcaggcacgttggtattgccaccgtacttggttttatcggggtactgtgtttattagttttggtcacgatgctgtcatacggcgtgttactgcgccccgatttagccagtttaaggcagccatcaatggcgggcgtgctggagcatattgttggccgctggggcgctatttttattagtatcggtttaattatctcggtgatgggggcttatctttcgtggacgttgctggctgccgaagcgctgtattccgcggctaaaagtcatattgtgccaaaaatctttgccacggaaaacaagcatggtgtgccctctgcggcggtgtggatgtcgaatatttttattcaatttttcttaattgtcaccctattcacagaatatgcgttccagctagctttagagttaaccagttctctggtgctgattccttacctgttggttgcggcctatggcttaaaactggcatggcgcagggaaacctatgaaaaggatagtagagagcatagaaaagactttttgattgccgccatagctacgttgtacgccattttgatggtgtatgccggtggactgaaatacgtattactgtcggccgtcatctatggaccaggcactttgttgtttattttggccaagagagagcagcataaaccggtatttacagccgttgagaaggttttatttgccgtcgccattgccgcggcagcgggcgcggtttatggtttggtgaccggcgccatcaatatataaatacacggcactcaatccaggataccgcagtgtagagcccaatagttcttctcgctgctatattatctttagcaacaatcacttataacgacagcctctgggggcgttcagagcctgagtgtttcacgttcatagcgatgggaataccgcagaatgtttcagatctcaacggataaaaatgtgctggatatcgagcttattcatgattttctgtcccgccagagtctctgggcacaggggatttcgcgagaaaaagttgaacgttctctttgcggttcgctttgctttggcggttacctgagcggacggcaagtggcgtttgctagagtcatcaccgattgtgctaccttcgctaatctggtggatgtgtttgtattacctgaatttcgtggtcagggttatagtaaactgctgctcggtgaggtgttttctcatccggatttgcaggggctgcgccgttttactttggctacgtcagatacccatgggctttatgctcaattcggttttacggcactgagtcagccgcagactttcatgcaacgttactctcccaatatttatcgagagtagcttgtaaaaaatggcgtaaagtgcggaactcattcgcacttaatcggcgagtgatggagggttaatatattaccgttattaatgcgttccattatgcgctgaatttcgttccggcaggggcttgatctgtcacctagactacgacaggatctgtgaccattaagtggtcagcacccgcgggtaaatgaatgaggtcgttaccacttaaataaaaaatggctggtgaataatacaccggtaggtgctttcttgaaaaaacaacgaaactctgtccccgcgggtgattacacggggggaataggtgatgcgcagtttgcactggtcgtgttgctggcgacttctgcggcattagtggttgtaactttggctgtaattttatggatagtttgagcaattgttgagtaatggaggatgtgtggataagagtttatttgatgataataaagtcattgccttggtaggattattaacagcggcgttaattgccgtcagtgtgatgtttactctgacttatatgacggaacgccagcgtaatgaagctaaagttgtagatatccaaaactgttatatccaaaacaaataaccctgtttagatgccagagccacactgccgctttctgagggccggggctaatatcatctcagggaaaattacgcctgtttttgatggatggtgtgcagcggcggggcgattttcaaatcaatgtcggcattctgtcgaaaatcgtagggtgtaatgccgtaacgcttcctgaacatataggtaaagtgcgactgcgaaccaaaaccaaaatccaaagcaatatcaaaaatagaagtgtcactgcttctcaattgataaaccgcgcccgccaatcttctttcccggatgtatttacccagagaaatgccggtcacttccttgaatattttttgcatatgccacagcgaatagcctgagtaagccgccagctcctcaaggtggatgactctaccgaggtgagtttcaacccatttactgagggcgcagactaacgagagatggttttcttgttgcattatttagtctgttccgaagataagtagtgatgcagtatacacaagttaaatccaacaagacaaaatcagggcgccttcctgattagcatatatgattaaatggcacgattaagtaaaaaatgtatcagctgcgagagtaaaaggagtagtgtcgtttgtgggggattccccctgaggaatttgtccgttcccgtaagaaaaaatcaaaattgatgaggtgatcgcatgttgataacggtgattatgactctgatagcggtagttggtgttacggtgtttctcatgatgccagtgatgattttggataaaggcaaacgtgttggaggtgatgaactgtgagaataggattgctgtgatgattgtctacttcgaaccaggcgaactgctcatctagcgcctggtttttttatactttccttttggttcctcgtcagtttaagacgctcatttcgctacaatgctattgattttcagaaaccgcgcacaggggtaaacgctgcgtcaaatatcccatttccaagcaatctcaaaggttaaccgtggttaaacctatacagattattctgatgacgacaccccgaataaagaaaagttgttgcgagcgtgatattctttgcctactgagctgcaaattaggaattttattgtgtctgagattttaacaaacgatcaagaattggtatccgatctggttgcctgtcagttagtcatcaaacaaatccttgatgttattgacgttatcgcgcctaccgaagtgcgcgataagatgtctcatcaactcaaatccattgatttctctactcatcccgcaggtgccgatccggtgactaaacgggcaattgagaaagccatcgcccttattgatctgaaattcacccaaaactgaaaaaacaacccgcagtatatgcgggctgttagtcaagttactcaatcaccgaggtggtttttttcagtaatgggcagtcggtgatgccgataaagccattatcgccattcaggaattgtgcagtaacaatacttctggctgtgaggtacttacactgtaggcctaatccagcagcgttcttttcgctgccgataaggacaccatagcctgaaaaaagcagtgccaggtaagcgaccagcaaaatgagtgcaagtctgaaaagggtcataaagagctccataaattgagatgtactcaatctgttacaaggttgagcacaactctagctgaaagattaaggtcagtttacgctaaaaatcctaaacttgcggagtagggcaaggcgtttaacctgaggaataacatccgtagcccgggcaggcagagtgatatagagaatgaccgttcggctatgacccgttgaggctggctgaagtataatttatcaaaataattaaaaggtgcctgatgtgaacattaagaaacttgttgcaacggtgatactgatagccgtttgttgcttgttttatctattagcgttagacagttactgcgatcaaggcggtaatttctctaatggtatttgttctattaccgctattgtcccttggtaatgttgaaccgcgatctggcaaaacagaggcataattattgcccgttgccgtctttcctctgaacaagtgtgctacgtttcagtattagtttgttttctgaacgcgccattgggcgcggcgcagtgataagatagcgttctagtctcgcatgtaatagggttgtcaatgtacgaaacaggtatgggcgcagtgaatatcgcctcaattggattctcatcgctggtggtcgtgttctttttggtcgtctggttctttttaagccgagccagcgttcgcgccaatgagcaaattcgattgcttcaggaaatcactgaacagcaaaaacaacaaattgagttactcaatacgttagtgcgtaagacctccggcgacggcaaggatttaccggatggtgatacggtagaagtgctggattttaaaggattcattcctgagcgttaatgctgtgaaggcactgtgaccgggttgcagtgcctgcccgatgtgctggtttcactcctttttctattatcctcctcgcggtaaaaattgctgcttcagcgttattgttcctttcatttatacattattagctttaatcttaaaccgacgctgattgtcataaatgtgtcttatttttcccctaatgtagccggaatactccagcccaagggtaaacctagatgattaaatggtatgaagaaagcgacaccgaagtgaaccgaaatattgcactgctgacgggagaagatccggacaaatggtacccttacggcggtgtgaaaggtaaagactattgcaagaatccctccgatgcctggccgattatctgcgccaataaaataggcattcactctcctgaaaatagcgacgataaccactggcaggcgcgtatcgccacaagccagggggaatggcaagcccgaagcaccagcccattacgggcggcaatgatctgttttttattgagtcaggatactgagaaagccctaatgtagttatcgagtaaatccgccagaaaatctggctgggtagtatgcgttatccatattttagccagtcattttgcgatggagctgatcatgaaacgtattattaaaggggatatgaatttatcccacctcgttattgctcatacggcgattgatcgccaccaacagtcctatggcgatcgtcgtcaaggctggccttcaacttatctcatccgctataaaaataatcgggtcgccgttgaagttgtcactcgacgtcagtcttatgttgccacattaatgataggtgcacgtaatctgagtagattgtgcaatattccatcgctttatccttaattaattgcatcaatcacatctttgccgtggttgatactcaaacatcaatggcattgatataacgaattttgccaccgggtttatcacaaatttcagactgataaacccccattttccccgcaatgaaatgccttaatccttgatgctaccgggtttaaatgttaaaaagccgcgcggcttcatttacggacagtcaattttctcgtttaacgggaggaaattgcggcagaggatacaatgcaagagcagttacaagattcgaccctaaaacgagggttaaaaaaccgacatattcagctgattgcgctaggtggcgcgattggtaccggcctgtttctgggcatcgcgcaaacgattcaaatggctggaccttcggttattttaggctatgccatcggcgggattattgcctttttgattatgcgtcaactgggtgaaatggtcgttgaagagccggttgctggttcatttagccattttgcctataaatattggggcgattttgcgggcttcctgtcaggctggaattattgggcaatgttcattttggtgggcatggctgagctgacggcggtgggtatctatatccaatattggtggccggaaatccccacttgggtttctgccgcagtattttttgtcgtaatcaacgctataaatttaatcaacgtccgaatgtatggtgaaaccgagttctggtttgccattatcaaagttgccgccatcatcggaatgattgtatttggcgcttatctgctggcctcgggttccggtgggccaggggcgtccgtcaccaacctttgggcacatggcggctttatgccacatggtatcagcggcctgattatggcgatggcggtcattatgttttctttcggcgggttggaaatggtcggtattaccgccgctgaagccgaagacccgcgtcgtagcattcctaaggcgaccaatcaggtggtttaccggattttaatcttctacatcggttctctgtcggtattgctttccctgtatccctggataaaagtggttgagggtggtagcccgtttgtcatgattttccatgcgttagacagcaatttggttgccactattcttaacgtggtggtactgactgcggccctttcggtctataacagtggagtttattgtaatagccgcatgttatttgggctggcaacgcaaggcaatgcgcctaaaatattgaccaaggtgaataagcgcggcgtaccggtgttatcaatcgctttgtctgctttggctacctccgctggcgtattaattaactacatcatgcccggaaaagcatttgctttattgatggcgctggtggtctcaacgctggtgattaactgggtcatgatctgcctggcgcatttgaaattccgcgccgctaaagtgcgtgaaggcgtagagccaagttttaaggctttgtggtatccgtacggtaattatctgtgcctggtgttcctcagcctgattctggtgattatgtacatgaccgaagggatccgtatttccgtgcagttaatgcctatttggcttggggtgctgtggatcggttttatactgacacgacggaaaaaagccgaggcttaagatgaaaccggcagtttgggtttattttctcatgtctgccgtgcgaatgttttgaaacctgacgtaaagcccgctcatcagcgggcttttttgtgagcgaaatcgataaatagtcggtgctgaatgcgcctcaacgctttgtcacgcggataagaaatagagacgaagaaagacggagtggatagaggcaaaaggcgttagaggcggcggggggctattttccgccttaatttcgggttaatttaggcgaagtaaagaatatcttgccgagtgtgcgagctaataaatcagtgcaccgagtgagtgcactgctatttgagaatcattcctgataacggcgtagttatccattaagagatctggtgcaaattggtttgagatattacgccacagcagggaatattatctccatataatcaaatatgattagaactgccagcgaagccaggcaaacaatacgttaccattattataagtccccggaatgtaggtggcttgcagcgaaagcttattatattcgacggaaaccagcggcaaaggcaatggcatcggaatgtaatagtactcatggcgcgcagtgacgctgagagtaaagcccgcgccgaaacgccatccgtccattgctcctggaatccacatcttctgaaagccataaccaataataggctcaactttattgtgtgaatccataaaagccatggcatacagagagtgccagtcgttatcttcatcgtatcgatatttgccaaagccaaagccccacggattctcgttatacgagtctgtcttttccttgtcgtaggtccaacggttatgccatgtcagcaccggtaggtagaattcacgccccggcgcatcccaggtcagcgagacattgcctttaaaacgttcccacaggccgccatcttcggctttaatggcattaggttgattggctaccggtaacgcttcgctgcatgccggaaaggccacagacaacagactcggcgcaaggagagcagcacctatagctgcaactttatatttcataatggagtctctggtatcgataagttgaatagggggagtttctgccccttgtgcctatcaaaggtaaaacaaattttgccgattaattattattgaaaataatccgactattagccgttttgattactttcataggtgtctttatagctagtttaattaatttagtaaaatacatcgggctttaaataaaggcgggtattgtactgaaaaaaatgctgatgaaaaggaagaaatatcctatttacccttttcatttagctaaggtataagaatcactcggtttttcaggtgcgtttacttgattaaaagagtccgttttatgtgtatttatgccactagtgataatccattccattgcaccatgatagtgcgcatccattttgattaaatagaataataaacttccgttaatgatgaggtactaaatattgattaaatagattccgatattttatttattattcacatttatttttttaggtaaatatatttgtagtcatttatgcatcgtaacgtttttttgtgaagacctgcggcttttagccgttattgtcatcagattgtcataagcatgagatttcgccaacctgagcataagtaaggatttaatcaactaaaagttgaaaatttcaacccggagtgaggtgtggaagggctgagggctggcagagcaggtatattctatttttatatatcaaagaccaataggctttattaaaatagatttgttccgcgtagaacggatagaaaatcgacaacgtttatgacgtaataggtattataaaaatagttagcaagattgttaaagttaagcaaaaaaaacgggttaaacagtataaaaaaatagagcagaaaatacgatgaccttcaacaaatttcagcatatttaagcagtgtttgtgatcgactggcccaaatatgtgcgacaagtacatcgttgattaaaaatggcttgccaacgaattcagagtatgtgataacgcatatgggtaaaacgaggtacagttctgtatatgtgtggcattttcagtaaagaagttctgagtaaagacgttagcgttgaataccgcttctctgccgatccttatcttagtgcctcaagcagtaacgactctagtttgtctatgtaacgcctccgggcgagttaaacaatccaaaggaaatactcaagatggctaagattaaaggtcaagttaagtggttcaacgagtctaaaggtttcggtttcatcactccagctgacggcagcaaagatgtgttcgtacacttctctgcaatccagggtaacggcttcaaaaccttgggcgaaggccagaacgtagagttcgaaatccaagacggtcagaaaggtccgtctgcagtaaacgttactgcaatctaattcagctctagctgaaaaaaacccgccttggtgcgggttttttcgtttctatagtaatccgttttattaataattaaggcaagatgattaagccggaatattggtttctgccgctgatccctggatgggttggatctatggctcgctgctggctattgcggcggaaactggtgtatttaaacgcagggacaagctcttcccgattctcgttggccgaaccggctgatttcggcggcatgcagtctgccggtgtacagatggtgcaacttcccgcgcggtctatctgatgaaaacccaatgattgcaactgatgctcagcaatggcggtaaggttgagatgtcgatagcggggagaaataaccgtttttgggatattcatattatcaataaatcgtgccactaaatcttcggttacctcgtaacaacaggaacgtgccgctgggccaatagctgcaacccattcatgcggcgaatcatcttgcgatatacgttctgccattcgcagtaaaattccatccaataatccgcgccagcctgcgtgagccacggcgatagcttttccgtcccgtcggctaaaaatgaccggtaggcagtccgccgtgagtaccgttagcaaaataccgggttgggtggtgtataaaccgtcggtttcaccgcaggcttgcttgggttcgcgaacatcgacaattcgcgtaccatgtacctgttttttctccggcatggtggcacgaaatggctgtaaattctccggcagcaatgcggatttactgccaaagccatgaagaatatgagggacatgggtaaataatctggatacgtcagtcatgtgaatcactttgcctcggtggctgcggagtagcccagtgtaggccgaattttgattagttggctactgttggctgctttaataacctgaatgacgttcccatttgcgctttgttgcaaaataagacgccttgtatcactgtttccaccctgtaacggccaaggttcaggtttaatgatcgaccagagcggataatgcctacagggaaaccgaatgatttctaaagtaaataatgacgctaacaattttgtccgttggcgttttagtctgctgtgcggttgtatcctgctgtcactcctaggattgcttgggcgggtggcctggctacaggtggttgaaccggagccgctggtaaaagaagagaatatgcgttcggttcgcgtgatgacgaccccgaatactcgcggcatgattaccgatcgcaacggtcatcctctggcggtgagcgtgccggtggcggcaatttgggccgaccccaaggttttgctggaaaaaggcggcgtcgggaatgatgcccgctggcgggcgttgtcccaaatgctacatatgccattggctgatattgccagccgtatcaatcagaatccggatgggcgttttgtgtatttagcgcgacaggtggagcaggcgtcggctgagtatattcaacggcttaaactgccgggaatcgccctgagagcggagtcgcgccggttctatccctcgggtgctacggtggcgaatctggtcggcttcactaatatcgatgaccaaggcatcgaaggtatcgaaaagagttttaatcagctactgagcggaacggcgggcaatcgggtagtacgcaaagaccgctacggcaacgtggtggaggatatttccgccaccgatagtcatcccggtcaaaatgttcagctcagtattgatgagcgcttacaggccgaagcttcccatgctttaaccaatgcggtgttgtttaataaggcggagtctggatcggcggtgttggtggatgtggacactggcgaagtgctggcgatggccaattacccgacctataaccccaataaccgaaccgatacgccggagggaaatttccgcaatcgggctatcagcgatatttttgaaccgggttcgacggtaaaacctatggtggtgatgacggcattacagcgcaaactagtgaaacccgatagcgtgttagatacgcacccttatattttgagtggtcaccaaattcgtgacgtcggcttttaccccgcgctgtctctcactggcgtgttacaaaaatccagcgacgtcggcgtatcccgcctggcattagcgatgcccgcttcggcactgctaaaaacctatggctcatttgggttgggcaaatctaccgaattgggattaaccggagaaagcagtgggttgatgccgcaccgtcaacgctggagcgatctggatcgcgccactttctcgtttggctacggattgatggtgacgccactgcagttggcgcgggtttacgccacgattggcagttatgggatttatcgccctttgtctatcactaaagtcgatccgccggtgttagggcagcgagtcctgcctgcggaacaggttcaagaagtagagcatatgatggaaagcgtggcgctgcccggcggcggcggggtgaaagcagcggtacgcggttatcgggtggcagttaaaaccggtaccgctaagaaaattggccccaacggacaatatattgataaatatgtggcttataccgctggcgtggctcccgccagccagccgcgttttgctctggtggtggtgattaataacccgcaagggggaaaatattacggtggagcagtggcggccccggtattcagcgaaattatggggcaaattttgcgaaccaagaatgtggagccagatgccgttcttggctcgcctcagcgccatagctgagaatagtgtcggacaaggctgccccggcttgcaaccacggaggcggttctttagactagcgccgccttgcgcgttctcgcattttccctgctatctggaaatataaccatgtcttatcaatgtcctctttgccatcagccgttacagcttaatcagaagcagtggcgctgcgaaaataatcaccagttcgattgtgccaaagagggctatgtcaatttgctgcccgttcagcataaaggctccaggcagccgggagacagcccggagatgatgcaggcgcggcgcgcatttcttgatgccggttactatcagccactgcaacggcgggttgctgcgctgttggacggcgttttgccgcctgaagccggattattgctagatattggctgtggtgaggggtattacaccgcggctatagctcaacagctgaaacagcggcgagagatgcaggtttatggcttagacgtcgccaaggttgcggtgcgttatggggcaaaacgctaccctgaggtgagtttttgcgtggcatccagccaccgtttgccgtttgccaacggggcactggacggcgttgtgcgtatttatgcgccatgtaaggcggaagaattggcgcgagcggtgaaaccgggcgggtttctggtgacggttgcgccgggcccacgtcatttatatcaattgaaagaaatgatctatcagcaagtgcagctgcatggtgagaacgacgaacatttggaaggatttgatttggttagccatgagtcattagcctacccaatggcgttgccgggatcgcaggctgtcaatttattgcaaatgacgccttttgcctggcgagcgtcagttgaaaccggtcagcagttggccgagatggaaacttttgcctgcgaaacagattttgttattcgtgtgcatcagcggcatatcgataaaactgaatgtagtgcagattaatgtcggtttctattttatatagccagatcattatggcttaaataatatttagataaagaattatgagcgtcagggaaaataggcgaacctgacgctctataacattcaatgatgtaataaacagcgaaatagcgataattaagtcaaatcattagtgataactaggggtgaccgttttatagtattggtaatgatttagatattatcaataaaccaatcagatcgcgggccggggaaagtgtcggcctaatgatgggtcaatgagcaactggattggttctttcactgtcattttattaactctttaaatttaaaacgtattatctctatttttgtgagttaagatccaggttacgccatgtgcgtccgccagactcggtcaccagaatcgatggtacgaagcgcacttgctctgccactttcaaggctaagtcggcaacttcctgcttattcaacgatccgctgccgtaattatattcgccgtccggtaatttataaactttgtcccgacctattaatcgggtaaaaccggcttcgtccattttttcattaagcgtctggtaatcgctttcttcggcattatgcaatttaacactcacggtaaagtaaggcatagaaatccatttatttagtgcgggataatatgctgtatatcatgatgggcggctttttattatgaccgagatcgaattgctgagaattaagcaggatgcgttaaggtaggtggcggttatttgtacgaatcattacggcaagcaggataataatgaagagaaaagaagagaaaagaagggaagaaaagagaaaggaagaaaagagaaaggaagggaagagaggaacagtgccagtgctctgagaagttaaagaccaatcacccatcggttacgaccaccgtgtttagccgagtagcaggcaatatctgcctgacgcaacgcctgaaccgtggattcggtttgttgggttagattgatattatcgtaagtaaaaaacaggaaatttggcttaagggatgttttttaagataaaacgcattctaactgcgtttgtgggctataaactcgaatcgttaatagcgccatatgcagaggcgattaatcttagtgatgtgattgcgttgagtggttacatttatattgtggtgaacggtgcgcgaaacgaatcagcgtctgttcaatttcttatctaaattattgacgcgctgtaatgggcaggtagagcaaatttccaatccattcaaacgatagcgtaaacagcaaagtcggcgctcaattcttatattgccacttttctccgtgacctgacgaacaggctgaaacagcttgtttttgctgccgtcggacagggtacgtaaagcgagaaaatgctcggcaatttgcgtatttgcctgctgttcctgcgccatttttattccctgatacagacgaatccccgcgttattccaaaacaggctttcgcccatacccgccagttggctcagagtaccgcaaaccggtgtcagatgatcttgcaccaactgctgaaaacgacgttcagggtcttgttgggttacttgatgacccgaatgggaaagaataaagctttcaaccacgccggcttcattgagcgtcaggccgatatgctccggtaaaatgggcaactgccagttgaactgcaaattaatccgcatccacggccccaacaggcgggcaaagtaccattgcgaccattttgataccaaagctgcgcgatcttcattcgaatgaagattcagcaggggcgagatcaaggtgagtgcgcgttcaggcgtatataaagcaccggcagaaaaagtctcgcgttgtctcgaggctgcagacggaaagtactgttcaatggcttcctgtcgggcgaggctgagattttctgcggttagcgccataataatcctatttaaaaaccttattcaaatcaggctttggggcatcggctgacgagttcaggcaagcataataggggataagaatcataatgagaatcgtttttatatccagagtgagatttcccgcttccggtggttgcaaggggtcgcattgctgtcgtttggcacattttcctatggttcaacgccacgacatctgaatctcaaccacattattgcattgcgtgggaatgccttcgttcgaacgattttggcgctggacgcaatagcgtgagcggtggcagacaagctggattacgggcaattttttcgggtgctccgcgctttatctatctgttacgtaaacaaatctcgtaaaagcattcaaattaatgaacataaacgcttgcaaagtgtcacgtcggcggcataattcgtgaattcttataataagcattcgcatttagttattaacatttaggcatcaacctttaaatattcgcattagcgataacatcgcaaactttcagggaacaccaaataatgaaaagcacagcaataatccggggcggtaaaaatcgtttagcgccgcgccttttgtttgtcatgatcggcgcagccttgggcacgctatctgcgccgctaatggcagccgatgaaacagcggtagcaaccaaagacgccgctaagccagctgcggcaaaaggtggcgatactattaccgtcgttggcacgcaggaaactttccgcgcgggcggtaacgatctgattccgacctatctggacggtcaggtggcgaacggtggccgcattggtttcctcggccagcaggatgctcgtaacgttccatttaacgttatcggttacacctctaagctggtggaagatcaacaggcacatacaatagctgaggtcgtgaaaaatgatgcctcggtacaaaatgtacgcggtttcggtaatgcctcacaaaactatcggattcgtggttttaatctggatggtgatgatatttcattcggcggcctgttcggcgtattgccgcgtcaggttgttgacaccagcatgatcgaacgcgttgaagtattcaaaggcccaaacgtttttgtgaacggtatttcgccgagcggtagcggcgttggcgggatgattaaccttgaacctaaacgcgccggtgatacgccattgactcgcgttagtctggattatacttcctcatccaaagtgggcggggcgctggatgtggggcgtcgctttggtgacaatgatcagtttggcgtgcgtgtgaatatgctgcatcgcgaaggggagacggcaatccatgaccagaaagagcgtaccaccgcactttctaccggcttggattatcgtggcgatcgcgcccgtacttccatcgatgtgggttatcagaaacaaaccgtacacggcatgcgtaccgatgttgcggtaggcgccgcgaccgttattcctgaaccgccggcggcgactttgaattatggtcagcagtgggtttataccgacatggcgaccacctttggtatgctgcgcagtgaatatgacctaagtcataactggaccgtctatggttctgttggtgccagtcgtaacgaagaaaccggccagtatggctcacctacactgacggataacaacggcaacgcgactattagccgcctgtacgtgccttatacctcggattctattgccgcgttaggcggggttcgcggtcatttcgatactggtttggtcacgcataaagtgaatattggttatgcggccaactatcgtaaagcgatgtccgcctggaatatgtccgacccggtagagaccaatatctataatccgggcgtgattccattcccgccggcaacttcaggtagtgccaatcaggatccaacgcttaacagtcaggttcgcgccagcagcatttccgtgtctgataccttatcggcactggatgataaagtgcagctgatgctggggctgcgtcgccaggaattggtgattcgtaactttagtaacggtgtgccggacagcgtcaattcacaagatgcgatgaaagtgaccccaatctacggcgtgttggttaagccgtgggaaaacgtatctctgtatgcaaaccacattgaagcgttgtctccggggaaagttgcgccctggtatacggcaaacgcaggtaatgtaaccggcattgttcactctaaacaaaatgaagtgggcgtgaaatttgataacaaacgctatggaggtacgttagcgctgtttgaaattaccaagccggcaggttctatcgatcctgtcaccaatacatacgctctcggcggcgaacaacgtaaccgtggtattgagctgaatgtgttcggtgaacccgtatttggcactcgcctgttaggtagcgcggtctggttagatcctattctgactcaagcgcaggatagtaagaataacggtaactacgcggttggcgttgctcgctatcaattggtgttcggcggcgaatatgatattcagtcggttgaggggttaacggcgacaggcaccgtgactcgttccggctctcagtatgcgaatgatgccaataccttgaaaatcaaaccgtggactcgtctggatctgggtatgcgttataccatgccgttaaaagataccaatctaatctggcgtgccaacctaatgaacgtgactaacgaacgttattgggaatctgtagaagatacgggtacttatatttatcaaggcaatccgcgcgagctgaaactgtctgtctcgatggatttctaattagcttaggctaattaaactctctgtcactgtcccgccgttgggttgctaacagcgggatttttttaatcgataatagctcgtttaccgatattctgcgccaaacgcagcagataaccgtccgcatcttgcactaaacattgtcgctgggcgatttcgatttcattggcacgataccaaacgtcggcacagggctgaaacaccgggcagttgacctgctgcaggcgcgtcagaatcggggcgacctcagtcacttcaatctggaaagtcacgccattacccaatgtcttaccgaaaggtgccgtcagccaatgatcatcatctccctgatactgctccagcataatttgcgcaccttcgcgaaccagatagataaagccttgttctggtcggtcgtatctgatgctgaaaccaattatttcacaccaaaaataaatgcttttcttgatgtcgcgcaccactatttcgggagccaacgtcgcccaattttccattttctgttgttacctcagtgaatagcgggaacagacagaataggggagagagggccattcgccaatacaaggaggggaaagttgtgttgtgagtaggatgaatcgtgaggaagagagtgttcaggcagccgatcagggaataactaaccggctgcggaggagctaggccatgttatacaggtgctcgtatagaatattaaagccgatgccgataagaataacgccaccgataatttcggctctcttgcctaacagtgggccaatatagcggccaatcagcataccgagcgttgccattatcatggtggccataccgatagccatggcggtatgcaggatattgacctgtaagaatgccagacctacaccgatggccattgcgtccaggctggtggcaatggcggtcatcaccaaaacccaaaagccgtgacgcctaacctgcgcttcgtccgcagaaggccctttacagccttcgacaatcattcggcaacctaagataaacagcaggctaaaggctacccagtgatcccactccataatgtattggctggcaaataagccgatgctccagccgattaatggcgtaatagcttcaatcacgccgaaaattaatccggtgcgaacggcttcacgaaaacggggtttatacagagtggcacctttgccaattgaggccgcgaatgcgtccattgacatgccaaaagccagaataagggttgctgatagattcatggtaaatagtctcggccgggtggctccatatacacgcaacccacccccaacctacgacggagttacgtgtctatggtctcgccaaccttacctggctgcccgcaccacgtttcgatgaatgaaacgagtatgttgatacgggcgtttctgaaaagcgatgtaatgcaggattacatgcgtcagaaaccggctactccccaatgaacggcgcaaccttatcatattattttgacatcggacaactataaaaaaataatagcgatcgagttgataatgatatttattcttgttatcaacttcagcgctaaatcagatgatataagcagcaataataatgtggacttaaagcggaaatatatttttgttgttggcaaattaagcattctgcggaaattttaatctgccattaggttcgaggaaatattttcaaccttgattttcaaggaaaaagttataaattttttctaggtcatccaaatgtgtcacttgaatcagtaacctacgcttttctaactcgataactagaatgccatcttcagataaattcatagtctttatccggttatattctataaaagcgttagcgtagaagaatccggtgggtttaaacaataatttaggccaacggatataagatatatacagagcgactaaagccaaaccaaacaataaataagtggtgagtggggcgccgtcggacatcacattattataaataagaatggcaattaacccgacaaagatcaggcagtcgagtttatttttacgttttaggcggatggccaataacgtttttcccttcaacgtcttcatgatgaattcgtcgtaaatagcgtagataagcaatagggtaataaagacaaccaagacaatatcggtaaccgacatgcgtttactcctgaaaaaacaaccgggggctagcccccggtttgatacagatatacagacagtgcgcggaaattacggtgccaggaaaccaatccagtagccgaagataccgatggcgaagaagcccataataatccacagggcgttaactttacggcgtaacagccacatacagccgaaggttaacagtagcggtaccagccccggcatcaactgatccagaatggtttgtaccgtcgtgatagtggtttcaccggcctggttggtaatacgggataccaccaccggaatatcaacgtgcgtccacttgttaaccaaggcccccataacaaacaggccgagaattgacgccccctcggtcagtttttgcaggaagccgccgcccatatcgttaacgatattgacccctttcttataaccgtaggccacgccgtaataacgggttagcaggcgaaccaggttaaacagcacgaagaacaggatcggcccgagcaaactgccgctcaaggcgataccggcccccagcgccgcgaataccggacgtacggtgccccagaagatcgggtcacccacaccggccagaggccccattaaaccgactttgataccgttaatcgctgcatcgtcaatcggtgcgccgttagcccgttgttcttccattgccatggtaacgcccagtaccggcgcggccacgtaagggtgggtgttgaagaactccaaatggcgtttaattgcctgcttgcgctcatcgttattctctggatacagacgacggatcaccggcaccatagagaagcagaagcccagcgcctgcatacgttcgaagttccatgacccttggaaaaggttagagcgtaaaaacacaccgcgaatgtcgctggccgtgagtttcttttcaccagtagttgttgtatcaaccatttctctcaccttcgcttagtctaattcgttatcgagatcgttattggcaggagccggaccagactgcacaacctgagatttgttgtatttcgggctgagctgaatgtagagaacggccatgacgacaccaatcacacccaaagcaacaaggttgaagttggtgaaggctgcggtaacgaaacctaaatagaagaacggcatcaagtagccagcacgcatcatgttgataaccatggcgtaaccgaccacgacgatcataccccctgcgatattcagaccgttggtaacgacttctgggatagagttaagcagtgactgaacttccgatgtcccgacggaaagggcaacgatcagtgcaggaatagcaatacgcatggcctgtaagaacagggcagagacgtgtagccaggtaatggctcgcagactaccgcgctccgccgcactgtctgccgcgtgctggaaagccacggtaacggtacgaacgatgatggtcagcacttgaccggcggcggccagcgggatcgccagtgcaataccggccccgatgctttgaccaccggcgataaccagaatggtagaaatgatggatgccagagcagcatcaggggcaacggcggcgccgatgttcatccagcccagagcgatcatttccaacgtaccaccgatgataataccggttttcatatcacctaaaacgataccgattaaggtacaggcgacgaggggacggtgaaattggaactcatccagaatggaacccatcccggcgatacaggcaacgataaatatcagcacaatctgaagagttgtgatctccattgtacttctcctatgactaaaaaaagctgagtaaaataaccctgttcaaacagaaccggacataacctttctgtgtagttatttatagagctaattagttaagttttgcgatcagatccatcatttttaagcgactatccgaagacacttttcgtacttccagttcgatcccgcgttcatttaatttcttaaatgcttcgacatctttctcatcaacggaaaccgcgttgttgacctgggttttaccctgacggaacgccataccaccaatgttgactgatttaatatccacgccgccttctaccaggcgcaggacgtcgtttggattggtgaataacagcatgacccgatctttggcatatttagggttgttgtatacgcgaatggctttttccacatcgacgacgtgggccgttacgccgggaggagcaacctgagtcagtagggtcttacgcatatggtcggcagcaacttcatcactgacaacaataatacgattgacgttggtttctttggtccagcgagtagcgacctggccgtgaatcagacggtcatcgatacgcgccaaaccgatcttcatatggtcatcgggacccaaaggtgcagcgggcgcggacggcgctttggctgcgggagctggttgctgcgtctcgggcttatcactcgtatctggcgtttttaaggcttttacaccagtgcgaccggtttccaccgcgatactgaccagttcggcgaaggatggattatcatcacgcgccataaaggtttctaccagcatcggaatgttaaccccggtgacgacctcatagttttctttatcaacaacgatacggctggcggcattaaagggactgcctccccaggtatcgaccaggaacaagacacctttcgtggtatccagacctgccaatttccctgtgtacttctcaataagcgtttcggcattttcaccgggtacgaaatcgatatacgcgacgttttcttgctcgcctaggatcatttccgcagtacgcagtagctgttcagccgctgccccgtgtgtgccgatgataatagctatactcactcgctaccccctcagttaactcaagattgagttctggcacgtcatgaaagttggtttactaccagcgcgtccctgcggtacatattgaatctattatgatagtcgtaatcactacgacccgccgacgatttgtcctttatccccatgaatcgattcaggtcatgggcacaatgccgctggctggtatttattttagtcagtgaaaaaataatttatgtgacgttgctcatttattgggacatgttatgaatagatttagtctggttggataattaaacagcactgatgtgacaaagagtgttggaaggttaataattcccgctatgacattaaaaagattcctgataaagttaagttcatttttatttgtaaggagttaagggcctcagctctccctatggactgtcaccgaagttactgctttgaagaaggttatcccccgcctgcgggtaaaaatcaggttattcgatcgcgtatttatctatcgctcatcttcgtacaatctttcactgaattccgacgtgtaatcggtttgcggcgttttgtcgtgcctgttaaatcacgtctgtcccgtcagtcatgttctaatttttggagtcttgcatggaatttctaatggacccctcgatttgggcagggttacttacgctggtcgtgttggaaattgtactgggtatcgataacttggtgtttatcgccattctggccgacaaactgccgcctaaacagcgagacaaggcccgaattatcggcctggcgctggcgctgattatgcgtttgggactgctgtcggtgatttcatggatggttaccctcaccaccccgttgtttagcgtcgccagtttcagtttctccggacgggatttaatcctgttggtcggcgggctgttcctgttgtttaaagccaccactgagctacacgaacggctggaaggtaatcagcatgatggcaatgctaaccgaggctacgccagtttttgggcggtagtcgcgcaaattgtggtgctggatgcggtgttctcgctcgatgcggtgattaccgccgtcggcatggtgaacgatttaccggtcatgatgaccgcagtgatcattgcgatgggcgtcatgttgctggcctctaaagcgttaactaacttcgttaacgcccatcctacggtggtggtgctgtgccttagcttcctgttaatgatcggcttaagtctgatcgcggaaggtttcggtttccatattccgaaaggttatctgtacgcggccattggtttctctatcctgattgagctgtttaaccagattgcgcgccgtaactttatcaaaaatgaatcccggttgccgcgacgccagcgtaccgccgaggcgattattcgcttgatgggcggacgtaatcaggagcaagagcagggcaatgcgcctcaaaatgcgcccgttgaagcttttgcggaagaagagcgctatatgattagcggtgtgctgacgctggcttcccgctcattgcgcagcattatgacgccgcgcaccgaaatcagctgggttgattgccatcgctccaaagatgagattcggatgcagttgttggatacgccgcatagcttgttcccggtgtgccgtgactcgctggatcagattatcggcgtggtgcgagctaaagatctgctggtggccattgagcaaggccagtctatctgcgaatttgcggcggcaacgccacccatcgtggtgccagataccatggatgtcatcaatctgttggcggtgttgcgtaaagccaaagggcgtctggtggtagtcaatgatgaattcggtgtggttcaggggctggtaacgccgctggacgtgctggaagctatcgccggtgaattccctgacgaagatgaaaccccggatatcatcaccgacggggatggctggctggtgaagggcggtgcagatttgcactcgctggagcaagcgctgaactgtcaggaactggttagcccgacggaggactacgcatcgctggcggggatgttactttctcactccggccacatgccatctgccggagatgtgattgaactgcatcaactgcgtttccaaatcattgacgtgaccgattaccgtattgaattagttcgtatcgataaaatcgaaccttcagacgacgaataagcgcagattttcggttaaccagttataccctaagggagccaatcggctcccttttaacaatccagcctcctcctgctatctcggcttctgagggggcaatgcactgacgtcagccgtatttcttagcgcgcgaataatgcgctgaccattgaaacgctaaattagacggcgaaataacgctgcgataaaccggatgctgtttaaacggacgagactttcatggagagaaatatacgagtttacgtgagttgatagaccaagaaatgtgtctgatctccggcggtaatatgggcagcgggaatttacaggccgcagcgagtgtgaataccaatcattcagtgaattaatttctgctggagtggaccctctatcgatatgaatgaaacaataaatatcctccggcatagccggaggtttttcatatgcgcctataaggctctgttgccagccgcgccctaacaggcgcatcgcgatctgacatttgcatttatggattacttacggcccgtaaacgggctgcccggataggggatcgagagttgctctcccattttatcctcttccaactggtgctttatgtattcttgtatcctggctgtatttttcccaaccgtatcaacgtaataccctcgacaccagcactccctgttacggtatttgaacttcaaatcgccaaactgcttataaagcatcaggctgctctttcctttcaggtatcccataaaacccgacacactcattttgggcgggattaccagaagcatatggatgtgatccacacagcattctgcttccagaatattcacgtttttccattcgcacagcttttttaagatactgcctatcgctttgcgcttttccccgtagaacacctttcttcggtacttcggcgcaaaaaccatgtgatatttacagctccatcgcgtgtgcgctaagctcttttcgtccctcatagggacccccttttgatttcttgttgaacatttgcagttgccagaccgcaaactgttttaacaaatcaaaaggggtttttataactggctcaaagctgaaagctttaccgaacctccagcctagctggaggttttctgtgcacaataaaacgggagccgattgggctcccgtttgctgatttatttttgccggtttagcaaaaggcatcagtgagttgcattgtatatttagttacactgcactttgatcgccagaccgccgcgagaagtttcacggtatttagcattcatatctttaccggtttcaaacatggtttcgataaccttgtcgagagaaacgcgcggttcgctgctacggcgcattgccatgcgtgcggagttaatcgcttttaccgaagcaatcgcgtttcgttcgatgcaaggaacctgtacctgaccggcaaccgggtcacaggtcagacccaggttgtgctccataccgatttcggccgcaatgcatacttgaatcgggctagcgcccagcagctccgctaaaccggccgccgccatagaacaggctacgcccacttcaccctgacagcccacttctgcaccggaaatcgacgcattcattttatacagaatgccgatagcgccggaggcgaggaagtaacggataaagatttccggtgtcacaggctcgataaagtgatcgtagtaagccagaaccgctggaacgataccgcaggcgccgttggttggtgcagtcaccacgcgtccaccggcggcgttttcttcgttcacggccagcgcaaacatattcacccagtcaatcacgttcattggatcgctggaaagtttatcggaagaaaccaacagacggcgtagcgcagaagcgcgacgcggaacgcgtagcggacccgggagaaccccttcggtattcagaccacgatcgatacaggcgcgcatagtgtcccaaatcgccgtaaagtaagcatcaatctcttctttactgtgcatggccagctcgttctgcatcaccataccggagatggacatcccggtggtgcgacagtgggccagaatgtcttcagcggagttaaacggataaggtacgctaatctcgttgactgaggctttaccgaaatgttcttcatcgacgatgaagccgccgccgatagaatagtaagttttgctgtacactttttcatcgccagcgaaggcgtgaatttgcataccgttttcatgcaggggcaggttatcgctacggaaaaccatgccgccttcacgcgggaaatcaacttcgtgcaagccattggccagcatcagtttttcacgttgctcaacatcgcgaataaaaccgggaatgctatcgatatctacggtgtcaggcatattgcccgctaaccccataatgatagcgatatcagtatggtggcctttaccggttaatgacagtgagccgtaaacctccacggccacacgcgtgatagaaggcattagtccctgtgttaccaggtcgtctacaaactgtttgccggctttcatcggtccaaccgtatgagagctggacgggccgatgccgatcttaaacatgtcgaaaacgctaatcacgctagaactcctcaaaaggcattgtgtttaaagccgatgttttatggtcgaagcgtttaaaaattacgcaacgggaacatcggtattgtaggttgactcgtcaattttcgtgactttattcgcatgaaataaagtaatcgcgagccttagtttattttgtttttactggtgttagcggtatcgatcggatacagcaacggtcactctgttaaccaacaacataagtgactttttttacgggttattaaccccacactattagtggtttatagtgaaggaagctattttacaggtatttcataacgctgacaggcctgtttacagtttttttaaaaactgcgatacagagaacatagagtaaaagtggtaaaagtgaggtgatagggatcgttttatgctgaaaatgagggggttagcgcgtgatgatgtgatggttatcacgcgtttcagcgcggttcgatgctgacctgctgagccagacggcgaataatggcggcggtgagtccccagacaaattgactttcgtaccaggaaaggtaaatccggtggtgcgcgcccgcgcgatgaacatccagtggataataacgtgaaaggcttaacgcttcgtatagcggcatttcgaatagaccggcaacctcctcttcattaccgtgaaaggggacgtccgcaggaataagacccacaattggcgtgacctgaaaacccgtcgagctatccagtggccctagctgacccagcacgcgtaccgattcaggaggaatcgctacttcttcctgcgcttcccgcagagcggtttcaatcagcgaatgatcttctggatcggccttgccgccagggaaagccacttgtccggcgtgtttacgtaaatgagcggagcgacgagttaacagcagcgtcggctctgggcgacaaataatcggcaccagcaccgccgcgcgatgatgatgagccgacaggctgccgggctggggcaactgaagctgaaaacgactgataaattcggctaaactgatcccactcacggctgcgggttctcccccaataatggcaaaatgcgcgcgattttatcaaaagtttcttgatattcggcttgctcctgactgtctgccactatgccacctcccgcccaacaatagattttacccttttccgtcaataaggtacggatggtgatattggtatccatggtgccacagcaactaatatagccaatgtttccgcaatatccattacgacgatgaggctccagttgttcaataatctgcatggcacggattttgggcgcgccggtaatcgaaccgccggggaaacaggcacgcagcaattgtgttggcgaacaattcgtcggcagggtggcggtgatggtactcaccagatgatgcaccgcagggaaaggttccaccacgaacagctccggtacccgaacgctgccaggttcagcgacgcggccaatatcgttacgcagtaaatccacaatcatcaggttttctgctcgatctttgggtgacgcggctaagcgctcagcctgctgccgatcggcatccgcatctttcagtcgtggcaaagtgcctttgattggccgagtctgtatctgttgattttctagccagacaaaacgctcgggggaaacgctgatcaccgtatgttcaggcaggcgaataaatgcggagaaaggcgcgcgattgctggcgctcaggcgtaaaaaagcctgccattcatccccctgatattcggcgctgaagcgttgcgccagattgatttgatagcagtcgccactgtgcagatattcctgtacctgacgaaatttttcgccgtactcttcacgagccatattggcctgccaagggctttgcagctcgaaagactggggcgtagccgggcgctgctgctcgagccattgatggcgttgctctatatccccgtggctaattagcgtcagtttttgccgttggtgatcggcaatcagcgcccagtcatacaaaccaatggccatatccggcaagtgaatatcttgctgtgccagctccggtaagacctcgattctgcgtcctaaatcgtaaccaaatagccctaatgcgccacccaaaaagggtaggtctggattcggtgagcaggtcaatcccaagcaatccagctgttgctgtaataaatcgaagggatcgatttctgaatattgggtattcagggaatcgctgatttccgtttctttgcctcgggtgatcaaacgcacgcggggttcagcgaccaaaatatcaaacctgttatgggaatgctcggcaaaacccgaatgcagcagcatcgcccaaggcaaagtggaaatcggagcgaaatagcgtaacaacgcatcggggtgataaggcaggcttttacagaaaggagcattggcttgcaggctatgagtatttttttcgactgacgacatgacaactcgtgaaataatttcggggaaaagattcggcctgtaaggttatcacagattatgtgggcgagggcagtagcggcttgacagggaattccctattacgctaaagaaacgggtatacttgccggctaattcgtaggagacagataatgctagcgggaatgccctcactttctcaccaagagcaacaggaagctgttgaacgtattcaccaactgatgtccgaagggatgagcagtggtgaagccataggtctggttgcggaagaaattcgcgagcgccacaaaaacgatcctcaggcaatggtcatctttgatgatgaagactttgaggaacacagcgatcctgaatatcgccgcgacaatgaaaaagacgcggacgagtatgaggatgactacgaaggttagtgataactatcagtgaccagaagctaagttatccgaaggctagctagccaaagtcaatcgccatcatgaaggtttcggtaaactagcctgcaaccttcatgatgtttcgtatcacttcctagagccttggatttttagctgtggctgaccgtgatttgcccagcggcatttttcgccacggccacggcttgttctaccgtttcggctacggccagcgcgacgcccatccgccgtctgccggcaatttcgggtttaccaaacaaacgcacgtccacgtcacccagcagcgcatttcccaaaccgcgatataccacattctggctggttaactcaggtaaaataaccgccgaggcggcggggccatactggcgaatctggctgattggcatgccgaggaaggcgcgaacatgcagcgcaaattcggaaagattttgtgaaatcagcgtgaccataccggtatcgtgtgggcgaggggagacttcgctgaaaataacttcatcaccgcagataaacagctccacgccgaataaaccgtagccacccaaagtttgaaccactttagccgcgatcgcctgagcgcgttgcaacgccagttcgctcatctgctgcggctgccaggattcgcgataatcaccctcctcctgacggtggccaatcggcgcgcagaaatggataccatctacggcgctgatggtcagtagggtaatctcgaagtcaaaattaaccagaccttccacaatcacccgaccgccgccggcgcgaccgccttgctgtgcataattccatgcggtttgtcgttgctcttcactgcggatcaggctttgccctttgccagaggaactcatcactggtttcacaatgcacggataaccgatttcggccacggcttgacggaagcggctttcggtatcggcaaaacggtagctggaagtgggtaatcccagcgtttctgcggccagacgacgaatgccttcacggttcattgtcaggcgagtggcttcggcgcagggcactacgtgttgacccataagctccagctccaccagcatatcggtggcaatggcttcaatttccggcacgatgtagtgggggttttccagctccacaattcgtttgagcgccgccccatccagcatattaatcacgtgactgcggtgggcgacgtgcatagcaggggcatcggcatagcgatcgacggcgatcacttccagcccaaggcgctgacattcaatcgccacttctttgcccagttcgccagagccaagcagcatcacacgggttgcgccggggcgcaaagcagttccaatggttaacataattcgatacctacatcagcaagataatatgcgaggaagaaaccgccgcagtatatacgaaaacgattgcgcgggcagcgcttagggcaaaaaacaggtttgagtgcggataaattcagcaaagtaaggtctggagcaatcaggggggcgaagatatcgaaagggatgcatttgacccatatctagggttacaggagaaaaacgcagatttccccgcgcttttttacgctttaactcaagaaaaggcctcaactctgctattatcgccgcaaatattgcgcttgccttcaggcatcgctttcaatccattccgttatataagagttaccgccgtgagcacaacgtccttttcttccctaacgctgcctgccgagcagttgtcgaaccttaatgaactcggttataccgaaatgacgccggtacaggccgccgcgttaccggccattctgaacgggcaagatgttcgggccaaagccaaaacgggcagtggtaaaacggccgcattcggcattggtttgctggataaaattgccgtgggtgagtttgtgactcaggcattggtactctgtccaactcgcgaactggccgatcaggtcagtaaagaactgcgtcgtttggctcgttttactcaaaatattaaaattctgaccctatgtggcggccagccaatggggcaccagttggactctctggttcatgcgccgcatattgttgtgggcacgccgggacgcattcaggaacatttgcgtaaacgcaccttggtattggacgatctgaaagtgctggtgctggatgaagcggatcgcatgctggacatgggctttactgacgcgatcaatgacgttatcagctacacgccgccgcagcgccagacgcttctgttttccgctacttatccggcggggatcgaacagatcagcgcaaaagtacagcgtgagccgctgaacgtagaagtggccgatgaaggcgatgaaccggcgatcgaacaggtattcttcgaaacgactcgtgaaaaacgtctgccgctgctgatctcagtgttaagccactatcaaccggcgtcctgcgtagtattctgcaacacgaaaaaagactgtcagagcgtttacgatgcgctggaatcacgtggaatcagcgtattagcgctgcacggtgacttagagcagcgggatcgtgatcaggtgctggtgcgcttctctaaccgtagttgtcgagtgttggttgccaccgacgtcgcggcgcgcggtctggatatcaaagatttggaactggttgtgaacttcgaactggctttcgatccggaagtccatgtacaccgcattggtcgtaccgggcgtgcgggcatgagcggacgggcagtcagtctgtgtacgccgtcagaaatggggcgtgcgcacgcgattgaagattatctgcaaatcaaagtgaaatggacgccggcggagcaagtgagccgcagcgccaatgtcatgctggagccagaaatggtgacgttatgcatcgacggtggccgtaaagccaagattcgcccaggcgatattttgggggcgttgaccggcgatgcgggtttgacggcggctgacgtcggtaaaatcgatatgttcccagttcatgcttacgttgctattcgcaaagccagtgcgaaacgggctatacaacaattgcagcaaggtaaaattaaaggcaaaaactgcaaggcacgtttgttaaaatagtaaataacgatttttacggggtagcgtgtattgcgttgctccgtttcagccccttatattgaatgttaataactgacggatttactgtttaagttattgaatttatatatttatttcgtttgtttgagctggccggaatcattccttccgctcaacggaatgactatttaaccgcatttaataaagggaatgtattaaatatgatacctgtcattaatcagaccgcagtatttttccgcccagcttctctttcttcttcctcggttaaccctaatgattttgcacccccaacaggtgagataaagtccgcgctggatcagcatattaagggaaagcaggtgctggtttttagcggcttttccggcatggggtacgacgatgttgaagcgtttcaaacctcacttgaatctacattaaaagaggccagcctcaaccacggaaaacataatgtagtggtggtcgcgggggcgaccagcgtaggtattggagcggtttattcgctagcaaaaaaactcgaaattaaaacgctggggattgtttctgaacaagccaaaggcggcggtgaaatagccagtagttgtgacgatgtaatttatgttcctgataaaaaaggcagttggcaggtgctctactatatagataaggcgaagggattaacgggttcatatatgacttatgtcgcctcaaaagcatcgccagcttcaggtggtgagttcttcgcttttgggggcggagacgtgacggtgagtgaacttaaggaagcgaaaaaactgggaataaccacgcgagtttatcctgatttccaacccaatcgggataaagtaaaagagcgccaggccaataaaccgggtagcgatatgacgcccgtgaaaacttatatgactcagtttttggaataaagcctgaccacatttttcggtagcggatgccaatccgggtttgagatccgtatttacgaaaatcgtgttcgctaaatgagtgttcatcaatttgccgttgaatgacttcgaataatgggaagcgctgagccgcaacgagagcttcccattatgttataatttctccggattaaatatttcctgcttatgtatccgccacttatcgttttcagaaatccctattattggaagggatttcgttctttcattttgaggtgaataacgcagcagggaatgattaccatcatgtctgagtgtctcttcggggcgtcgcggatattaataaagttacgggttggtaaaaggactctaataaatggccgttgaagtaaaattcgttgtagtacgacagggtgaggaaaaaatgactttcacaaccaaaaaagaagccgatgcatacgataaaatgttggatttggccgataatctggccgaatggttgtcgcagtcccctctgacgatggaagaagaacagcgtgaagcgctgagtttctatctggctgaaaataaagatgttttatggcagattttacgtggcgctgctccaaccgcagcggcggagcctgtggtgaaaaccaaggcagagaaaggcgctgccaataagaaaaatgacaaaaccgaagaaattcaagcggcttaatgagttatctcccggcaaaatggggaaaaaggatctagaatgaatcgtgaaatcaccttcttcagccgttttgaggcggatattctggcgaatcgtaaaaccattactattcgtgatagcagtgaatccgattttcaacccggtgaagttttgcgggtttgccgcaatgaggatggcgtatttttttgccacattgaagtgaagtcagtgacgccagtgacattggacgcattaactgaacgccatgcgaagcaggaaaacatgtcattggatgaactgaaaaaggtgataaaggagatctatcccggtttgcagcaattttatgtgatcgaatttacccagtgctagttctgtaatggaattcactctgtaacctacaacgcgatcttttgctgcacctccggatagaaataataacgattggaggagcaatgaaaaaaacggcattcactttgactgcgatgatgatggcgctgggtagcatggctgcatcggctcaaaaccacgagcaggagcaacgcactgcgaagttccccgcctgcgtgggattgactcaggccaaggtggcgactcaggtgaaacgtgactttttgcaaaatcgcattgtccgttgggagtctgataaaaagctgctgggaaccgcaacgccggtggcctgggtgagtccagatgatatcaatgggaaagacgatatctgggaagtgccgctgacggtgcgcgggaccaaagcgaataaaagctacgacgtggttctgaactgcgttgaagggacgataacctacagtttgccgcagtaacaggttaaatttagacaggttttagtcgctcaggctattttgaatgacagtgtccgagtgccgctttctgactgaaatcccgattcgcaggaacggcattcggcgctgattatagtttctccgaattattcaacgactgtttacgttgcctctcgatacacctcttatttatcatatggttaccacgacatcggatttgccgaaaacgtgcaggtgctcttggcatcgtgcgttaatcgtgtcactctggcaaacatatattgatacggataattcacagatgatcacacctccaaaggcggccaagcgccctcataccatgactttgcacggcgatactcgtgtagatgattactattggctccgcgatgatgaacggagcaatcccgaagtattacgctacctgcaggcggaaaatgatttcaccgaagcggtgttacagcctcagcaaccgctgagggaaagcttgtatcaggagatggtagcgaggatccctcaacaggaagcctcggttccttatgtgcgtaatggatatcgttaccaaactcgctatgaaccgggcaatgaatacgctatttacgttcgccaacctaaagaggtcaatgccgaatggcatacgttgctggatggcaatatccgtgctgcagacagcgagttttatactttaggcggtttggacgtgagtccggacaatcagctactggcggttgccgaggattttctgtctcgccgtcagtatgatattcgcgttaaacaaatcagcgacgatcgctggcatgacgaagtcatccgcaatacctcgggtaatttcgagtgggcgaatgattcgcaaaccctgtattacgtgcgtaaacacgaaaagacgctgctgccttatcaggtgtatcgccaccgtatcggcaccgatccagagcaggatgagcttatctatcaggaacaggacgatactttttacgtcagcctggaaaaaaccacctcggagcgttttattctgattcacctcggtagcaccaccacttcggaaatcctgctattggatgccgatgacgctgaggcgatgccgcaaatgtttgctccgcgccgtcaggatcatgaatacggtttggatcattatcagcagcatttctatattcgttcgaataaaaacgggaagaattttgggctgtatcagagccagcaggctgatgaaagccaatggcaaaccctgatcgagccacgagttgaagtgatgctggaaggcttcagcctgttccgtgattggctagtggtggaagaacgtagtcaggggttgacgcatctgcggcaaattcactggcgtagcggcgaagagaaaaccattgccttcgacgatccaacctacaccacctggcttgcctacaatccagagccggataccgcgctgttgcgttacggttattcctccatgaccacgccaagttcgctgtttgaagtcaatatggataccggcgaacgggttttgctgaagcagcaggaagtgaaaaacttcacggcagaacattatcgcagtgaacggatttgggtgagcgcgtcggatggggcaaaagtgcccgtttcgctggtttatcatcgcgatcactttaagccggggactaacccgctcatggtttatgcctacggttcctacgggagcagtatggacccagcgtttagcggcagtcgtctgagcctgttagatcgtggttttgtctacgcattggcgcatattcgcggcggcggcgaactggggcagcaatggtatgaagacggtaagttattcaacaaaatgaatacttttaacgactttattgatgtaaccaaggctttaatcgagcaaggctacggcgacgccgaacgagtgtttgctatgggcggcagcgctggcggcttattgatgggcgcggtgatcaatcaggctcctgaattatttaaaggcgtagtagcgcaggtacctttcgttgatgtggtcacgaccatgctggatgaatctattccgttgacgactggcgaatacgaagagtggggcaatccgaacgataaggcttattacgactatattaaacagtacagcccttacgatcaggtgcgcgctcaggattatcctcatttactggtgacgaccggcctgcacgattcccaggtgcaatactgggaaccggcaaaatgggtcgcgaagctacgggaaatgaaaactgacgaccatcaactgctgctgtttaccgatatggactccggccacggcggtaaatcaggtcgtttcaaagcctacgaggatatcgcactggaatacgcgtttatcctcgcgctggcttaatttacctatgattccagataatgcgttagggtatggcgcatgtctggagtcaggtctttcaccgatttcagcatccaacgcagatagtccggatcttgctgggctatctgttcaatgttttgcccacgatacttgccaaatttcagcgtccgtaacagcaggggggcctgcgtcagctcaaccattttctcagcgctccaaccggagtctttaattatgcgttgcagcagggcggcggtgatatagcagtcatataatgcgcggtggggataaagattttccggtggcgtaacttccagtcgcagggcataacgcagatattgattactgtatttgatatccggatacagtgctcgcgccaatttataggtacaaatccactcaccgcccatttccggcaagacacctcggtcaaacggggcattgtgcgcgacataatattgactgccttgatatcggccaatggctttagcaattcgaggcttaccttccaccatttcttcggtgatatggtgaatggccatagcttcaaggctaattggccggtccgggctgattaaatcactgatcggattaacgattcgcccatcaatcagatccaacgaagcaatttcgacgatcccgccgtctaacccgcaagtctcagtatcaataatgcgaaaattcatgtgttctccagagactggccattattcggttttatctggcgatcataatagactggccagtccctgccaactttcttcagtcaggcgggtaatcaccagagcctcgtgttaccgctaatctgggcgatcgcgttgccttgttgatcccacactgcgcttatgcccgcgccgattttagccgaataaattaagttataggcaataaaaaacccgcctgagcgggttaacttaacgtgatgaaaaacctttactctgcgctggaagaagatgccttcttcgcacgtttctccgcctttttttcggccggagttttcagtggttttttcttcgcgttctttttgctgtccattcccttactcatggtttgcctctctatgaccttcggttaggttggtacgcatcttcattaaggccctaatagcgaatacttgcaaggagataaagtcgataaaaggctaacacgctgttaattataatgattattaaaatgtaatacttgatattaacgaggaatagcgacattaacatcctttgccagtgaaaccgatgtaatgatcggttatggaatctgcagcgcatttcctaatgattgactcatcaacggcgataaaaaatgcgcgatagggatcgtataaccggtatttaaatgattaatcagctttatttgacctctttagtcgttgaccctgcgtcaggcataggcttttatagagaggtgatcaataacaaaaatggaaaatgcgatgggacaattacggggactctatccggcttatgagccttacgattgcggctggttggaaaccggtgatgggcatagcatctattgggagttatgcggtaatccgcagggaaagcccgcagtatttattcacggcggtcccggtggcggcattgcgccatatcatcgccagttattcgatccaaccaagtataaagtgatgctgtttgatcaacgcggctgcgggcaatccagaccacatgccagcctggataacaatactacctggcatctggtggaagacattgagcgtctgcgcgaactggcgggtgtcggtcaatggctggtgttcggcggttcctggggctctacgttggcattggcctatgcgcagaagcatccggagcgggtgagtgagatggtgcttcgggggattttcaccctgcgcagagaagaattgctttggtactatcaggacggcgcatcccgtttcttccccgataaatggcaaagggtattatccattttatctgaagaagagcaaaaggatgtgatcgcggcttatcgcaaacgtctgacatccccggatcgggctgtgcagctggaagctgcgaaattatggagcctgtgggaaggggagacggtaacgttattaccaactaaaagctcggtttcattcggagaggatgattttgccttggcttttgcccgcattgaaaaccattatttcacccataacggttttttggcccatgacaaccagcttctggatgatgttccattaattcgtcatataccgacggttattgttcacggccgttacgatatggcatgtcaggtgaaaaatgcctgggatctggcccatcgttggcctgaggcagagttacatatagtggaaggtgccgggcattcattcgatgagccggggatattgcatcagttgatgttatcaacggacaaatttgccaaataatcgggttcccgcaggctaaacgctggcgggaacctttcagtcgccttacttaattttaggctcataaggcaaacgtgagaatttattcgattcgctccgatagtgcgcgaggcgctgcaaaaagtagtctcgcaggttttccgtctgttcacgggcaaccagttcagggatcactggcatgttatagcgttccttaaatgcaacgcccgatgcagctaaatcgacgttcatttttgccgtttcttcgtcagaaagctctgccaagttgtaacccatcgttttctcctctttcgacttaagcggcggattgtatcaaatcagcgttgaaaataatgcaggcatctccctatggcaagagggtgtggataacggcagagaggaatgtagagaagaaatagcgagccaaataataaatgagaatgattggcgtttattttaaataataaattaaaaataagaatgattccttttattattggcgggcttgttgataatagttatcaaagttatttgcccactttttcccagattaattaaataatttatttcctcatattaaacatgcagttaatacaatttgttgttttaatctttttaaatgtgaatagggtgtttttattttgtgtttatgttggcataatacgtgaaataacctcctgccaacctgcatgataaaaactagggactaattatgttgaagaaagaaatggctcaaaagctcaatgagcaactcaatttagaattctattctgccaatctttatttgcaaatgagtgcatggtgcagcgataaaggttttgaaggtgcggccgctttcttgaaagaacattcgcaggaagagatgcagcatatgcagcgtttgtttgaatacctgagcggcacaggttcgatgccgatattgggcaccatcagtgcgcccccggtagagtttggctcgttagctgatgtcttcaagctgacctatgaacatgagcaattgatcaccaccaagatcaatgaactggcacatgttgccatgactacgcaagattactcgacgttcaacttcctacagtggtacgtttctgaacagcatgaagaagaaaaactgttcaaatccgtattggataaattggctctggtgggtaacagcggtaattctctgttctttatcgataaagatttgaagaacatggccaccagcgcgcaaatccattctcaaggttaattctatcttttgagctataaccgcagtttctctgttatcgacagaggctgcggttttttattttgtgtcatccctgcctgaaaccatttcttgtctgtgcctgtaagctcgacttcatactctcaactcattattattcatggctaacatacggaaacggatgacttcaagtgagcatccggtggcttttcgaccacttatccgatgtcggcagtttattttgtgtggtatctcacatgtagtacatccaactggaagcgatcggggtttacgccgccaatatagggtaaagttggtagcagcgatttttttaccccaatttatttaagggactttatgttaattaacaaagtacgttcatcctgccgcatgctttctgcactggttgttttgtttgttggcctttccagccagcaggctttagctcatgctcatttgaaagtggaaacccctgccgccgataccacggtaagtgccgctccagaagcgttaacacttaatttttccgaagggatcgagttgggtttcagcggtgtgaaggtgacggggccagataataacgcggtgaaaaccggcgctttaaaacttgacccggttaataacactcagttgattttgccgttggataatgcgctaagcgcagggaagtataatgtttcctggcatgtggtgtccgttgatggccacaaaaccaaaggcaattacagcttcactgtaaaataatatgtctttagcggccttatttgtcctgtgtcgctttgtgcattttatggcggtgatgctgatgtttggtgtcagcgtattcaccgccatattgtcatccgaccgtttcgctctaacattacaacaacgccttcaacccttgctggctagcagtacgctagtcgcggcattttctgccgtcggcctgttgtccattcaggctggaattatgggcgatggatgggcagatacctaccagtttcccgtgtgggggttagtgctgggcacgcgtttcggccaggtttggcagtggcatctcgcactgtctttcatcagtatcctgctgttgtttttcaatcgaaaatcatatttttcggctctgatggtcgcctgttcgtcgctgttactggctagcttggcttttatcggtcatgcggcgatgcatgatggcataattggctggatacatcagtcgaatcaaattctgcatcttttcagcgccggttattggttcggtagtcttttacctttgctggtttgcctgccctatacccgcaatagtcagcataaacccgccgctatccatactttaatccgtttttccagttggggtcatttggctgtcgtgctggtggttgtcaccggaatgattaatagtttcattatactgcgtggttggcccctggatttcacctcgacatatcagagattgctttggtgcaaaattgtcttggttgttttgatgattatcattgcggtaatcaataggtatcgcgtggttccagcaattcgtcatttaccggaaaaagcgcactattggctggtgatgaacgcttggtttgaggtggtactaggggcggcggttctacttttggtgagcacctttgctacatttgagccggtataagcggctagagggctaactagcagggaacaaggcttgcttctttagggttagatgcaggaaaatcaggtcaatcagctaacttaggaatagttaacatgaagggtttcgcgctaacgctttctcttttgcttctggctgctaatgctgcggcagcatcaaagattatcacggtcagtaagtttgaatttggcaagcaatgggcattcacgcgtgaagaagtgatgctggagtgccgctcaggtaatgcgctgttcgtgattaatcccagtacactagcgcaatatcctctcaatgaagtagcaactgagcagatgaaatcaggaaaagtattggcttcatcattagatccgttggttttggaagacaaagataatccgggcaaaaaaatgagcctgcaacctttccagcaacgagctcaaactctgtgtgaaaaatagggcgaaagcggatatgcccgccgggatagcgtttgaataatctcataattaccagtggactaactaagaagctattagttaacctgagtgattattaagttattatgtcgaaagttggtaaaacgtgggtcgtctactacgcttaagtagtacggctgaataagcctgcatgaaatgccaacttttagcgcacggctctctcccaagagccatttccctagaccgaatataggaatcgtattcggtctttttttatctgattgtttttattgatgttttttctctccgtccgaaaatgtccgaaatttgtccgaaatcctatactcggcctaaatctcaacccactcatttttacgtgaatccaggtatacattcgtcattttcatcgacttgtgaccaagcaatttctgtgcaaattccttaccgtattctgcttcataaagccgcgatgccaggctgcggatttcatgaaaactgggcggggagacttcataaaccagatcggttgccttcaatgctttaacaaatgctttggtgagcgagtccgcatttaatgcaccgggctctcggcctgattttctactggacgagcaaatgagatattcgctcttattgttattcaggcattgttctacaacgtcaccgacggaggtattcattatttccaaccgaagtgatagtgatatagctatctgcattttagttttactttggactatccaaagcttgccatcatgcacgtcgcttctttttaattgccgcacatcgtcacggcgttgaccggtaatcagcgccagtgccaggctgagttgaacccagttctgttgttggccggcagcctcataaatcttgcaaaaggcttcatagtcgagccgctctcgcttaacttttggtgacggcgtacgggttgcttccacaggattgcggctaattaatccatcagctatggcctctctgaaaacgtctgataaaacagagcgcaaattaaccgccattgaacttttaccattatcgacataggtattaataaaatcagcgatatgcttggtggtaacggtttcaatcggcttatctccaaattcttggttaatatatccgatttgcaggactctcattttcatggtgttatcagccagctcccgacgctttaatagtcctcatgtattggccacctgaatagaggtgatatgctcacctcagaacaatacaggtgcctcaatgaaaaaaagaaattttagctcagagtttaaacgcgaatcagctcaactcgttgttgatcaaaactacaccgttgctgatgcggccagcgctatggatgtgggtctttccaccatgacgcgatgggtaaaacagctgcgtgatgaacgccggggaaaaacgccaaaagcttctcctattactccagaacaaattgaaatacgtgagctaaagaagaaactacaacgtattgaaatggaaaatgaaatattaaaaaaggctaccgcgctcttgatgtcagactccctgaacagttctcgttaatcgggaaactcagggcgcgttatcctgtggccacactctgccacgcgttcggggttcatcgcagcagctacaaatacgggaaaaaccgccctgaaaagccagacggcagatgggctgtattacgaagccaggttctggaactgcacagcatcagtcatggctctgctggtgcaagaagtatcgccacaatggcaacgctgagaggcttccggttggggtgatggctccatgaaagaactgggtctggtcagctgccagcaacctgttcatcaatataaacgtggcggtcatgaacatgtcactatcccgaatcatcttgagcgtcagttcgcagtcacagagccaaatcaggtgcggcgatgtgacatatatctggaccgggaaacgctgggtatataaaaatggaagcaatacgctgtctgaagcgttatatctcacgcgaagtttatacattactgcgaaatcaaaacagacagatcaacagcatctcgataacggcttgactcttagaagggcgtccagggtagccactatacaagcaggcagttccgacagtcactgtggcggtaccggatcaggcaaagtatgagtcgccgtggaaactgctgggataatagtccaatggaacgcttcttcagaagcctgaagaatgagtgggtaccggtgacgggttacataaacttcagcaacgcagtgcacgcaataacggactatatcgttgggtattacagcgtgctcaggtcgcacgaatataacggtgggttaccgccaaacgaatcggaaaatagatactggaaaaacgctaaagcggtggccagttttagttgaccactacaaaacgcgtatcgtcgtcggtcgggtcgtcttcgccatgatctgctggcgggttaatcgacgtgacttcaatgggattgcttggcgcaggaataccgagccgaaaactggccgcaggataattacctctgccttgggtcgcaatggcggaactggttaccttggggtattcgccatcggtaaaatacacccgatcatatttatcctgagcgattgggctatgtatcgcatccacctgtccgcgccaggcaaaccagaaattatcccggtaacggaatattgtctctggtttgaaggcaaaggtttttccgccgtcaccatcagccatcattggggtaattacgccgtggcggaagtggcaattacgggcaaccgtggcggcttgttcaggtaacagatgtgcgaccgcacgcggcatttcaccacgcatggtcgtgatatcaatagcgggcataatgagtgatttccgacaggcataaaaaaagccccactaaaaagtgaggcttggcatctttgggtaatttagcgcgtaacctgttcggcatcaatgatatcgtcgtttttttcgcaaccagagcatcaaacaacgacggataacacgaaaaccatgagcgagccaacatccaccttatcaataagtatacaatttgatagtattgtaaaagatattcagatgtattttgtgagttcggaattttaggtttttcaggaaattaacgtaagggaattatgtggctaatttaatttaatttatttgactataaaaggcgaaaaacaggggcttatctctgctggatgctcaacttatgactcaatcggcaataaatttcaagccggtcatactgaccaaataatggtctactcactgactcatggtatcaaccgggctcagaatgcgactcacttacctataaatatcgttaaaccaatagataaggcaacgccattattaggcaccgctatttctgataatgaagttttgcatctgacgttgacctctacagaacatcaagtaatggtcatcaagaaatctatttttccattgaagttagaaatgccaacatcaagcatgttggtataaattacccccatattatgaccaataaagatagccaacccgaagaaatgctcagtgtcacctaccaagatataaaatgggtccatcacgcggcaggaacgacaggttatagtttgtgggaagatagggtttattaagccgttatgacagtgactggtagtgtgccggtacatatatagatattgtctgctgtgtaccggtatttttttatttcttttctgataaatcttcccaattagttgagctgccatttatcaattgatagagggaaagaccgacggtagaatcgccagtcacttcgctgatgagtccggcagctcccatgtctctccatccaataatataatcctctcttatatggtggaaaagcttccaggcatctttttttagtaccgacctgaacagcgaaccggcagaaagagaaagatcaccgatggagaaggcgatatcaccgtctttatcatcgccgcccagaatccttgccgactgccggtatacgtttcttaatggtactagactaggatcttctcgatataaaagataatagccattctcccatacgttctctgaaccatgcaaaagtaaaggacttcccaaataggagcatgctgcccctaggctggtataacaaatccccccgccaccaattatttttaaccatccgcttacaaaaccaacctgtttcaagataatattggttattgaattctgttctttttttctttccacaatggcatatagcttcgcatttcccatatgaagagacatgcttacttttaaaagagattgatattggtcatgaagttttgtattggcttcggaaaattgaagtcgtcctaatctataaccagtaacgctggcttctgccatttaatattcatcgaaaatgaaatcactaataacggccccattatttaaatattgataagcaacatctctagccatgcggtttatcttttctcgctctctttctaatgccataatcgcataactatccatgctatctccctcctaatgaaaacaatactttaaaactccagaataattttttgaaaaaaggagtaaagatgtacattataacaaggcctggtaggtatatagcactaaatgttataatttctctactatccatcttattgatgaagaataagtaagtcagtattatacatagcgaataccaatacaaaccggataagcttaaaaaaaattgccagctaacgcttgtttttttatatttggcgagtttaattaatgtgccagcatcaatttgtttcattcccagcgcgattagtttgtttttttagctcgacatcatccatatgtttaattccttttaaaaataagtatctatgttagataaacgtagtcgttcgctttaaccagtttttatccaacgggcgaaagtttaacctcccccctctccaaccgcaaatctacccaccgcccatggggaatatccaccgcctggccattgctgtagccgtcccgtttattctgggcaaatggcggtgagttggggtgttcgcggtgataagtgcggatggtgataacaccagattcatccacttcccgttctaattgagcgtgaaaagcggattgtcttacaggccaaacactttatgcgagttcgtaattaaaccgaagcagaatcacaacgggggcaatgaaggttaacgcaagccatgagaaaacctcaaaagatcgcaatgtacatcaaattcacacaactggagtcattatcttttagaataaagattcaccgtcttctaacggtaatgttttcggaaagaagcactttatgttctatcgctgcggctaaaaggagagttagccacttgttttgttcatgatcgaaaccatcaacccgatgcgtttgcggcaatttttcgttggccggttgcatttttacacgacagctactaggccatgctgaaagcatgaggacagtacggcctgataatgtctaaagcgtgggcaaggttgacggaaccgtctcagcgttactcaggggcttcatagatattgacggtcatagaactgaagatggagtaatgtttattaaataccgagctcatccagttttcaaactcaactgtggaggtgaaggataactcgccgaaatttggatccataaagcggatatggtcttgctcatcttttatacaggcgacggcatgtcctggtccatcgtctggggtgagtagataacacatgttgtagcaccccttttcgtcattgcgtgctaggctcatcgcttgggcagcgaattggggggtaaagtcttcgttgttcactatataagtaccaacgtgattgaagtgatccttcagttcatactggattctggtttgtgcttcagggggcggtagggggtgatagtcatcgttaagatattgagataatacctgccatttggcagatgaatcggcaagccaagcgtaaaaaccctccccctgtgaattcttgacaagatactttgccgacatggccatgcagacgccgttatcggtcacattggttttaacaccaaacgcctcattgacgctcttggtaatctccgattgattgtagctggtttctatatgaccaaagatcgtattctgattggtgacattgtttatcatggctgaatctctacgtccttaatgtgctttatttccctgagttctctataacaagtgaaggggctcaggttggttttacttaataatattagaataatgagagttccactttcatatttcgtccggtcttgttgcaagaatcggtaatgactccaattgtgtgaatttgatgtacattgcgatcttttgaggttttctcatggcttgcgttaaccttcattgcccccgttgtgattctgctttggtttaattacgaactcgcataaagtgtttggcctgtaagacaatccgcgtttcacgctcaattagaacgggaagtggatgaggccggagttatcaccatccgcacttatcaccgcgaacaccccaactcaccgccatttgcccagaataaacgggacggctacagcaatggccaggcggtggatattccccatgggcggtgggtagatttgcggttggagaggggggaggttaaactttcgcccgttggataaaagaccgatgaaacatattggccgatgactacatttatccagtataaacactgattttttaaaaggacttaaatgtatggatgagcaagaaataaaagacaaattggttggtcttggcattagtagtttagatgcaattacattgataaaaattgcaaaaaataaaaaaaccactgtaactcgagtatttatttcaaatcatatagggctatatattggcacggcggcattggttggggtttattttttatttgcaagtacaatgagtgagaaagaattgatttcattctctgctgcttatatacctgtgctgtttataatttattttttaactccgttcttgaaggagtttttttggagtttaaaagttttattctctttgaaaggaatgtgatatgagtagctttactctttctgtcttggaaagaaaaaaagaggaaattaatcgtatcgcagtaaatgtcgcatttttatatttgagtgatataaggctacgaagcgggtttatcagcagtaaaatcaattggcagacaataacattagtgaattcaagctagggagattgtcgttcagtgaggttatgtctaacctccatgagcaatacaaaattcttgaagatagacattttgatttgatgcttgataatgctaagttatttgttattgccgaaaggaaaaaagaacaaaattctgcactgaacattatattaaagcaagtagggtttgttagcggcgggttgcagatagttggcggggccggaatatgtaaagttagcttgggaatggcatgtgcttcattaggtgtccattaatagcccacggagcatcaaacttgagtgaaaatgcacactatcttttattccgtgaagaaccggaggcaagttttttgcggtatgcctatcagcatactgctattgtgttaggaggaaccaatcagcagggagatatagcctattttgcccatctctctgacccgaaatgtcttccgtcgcctgcattatcccatcgatattattgttcagtgtgtcccctggtatctggcttactcactgagtttacgcaaccaaaaagagatgatggcagagcggggtattgtcgttgatcattccatactgcgtcgttgggttatccgcctggtgccgctgttagataaggttttttgcaaagctattcatcatcacggcgaacccgagagggcggcgattgataaaagtggtgccaacagcgcggttttggctatgctcaacgcagacaaactcgatgaggaaacgattaacctaagacaaagcaactatctgaacaacaacgttgagcaggatcactgcaacatcaaacgacggatacgacacatactgagattcagctcatctcgacgggaaaagacaattctggccggtattgaactaatacaaaagggcaatacagaacctgcaaagtgagggattatcatccgcggaatactcaataatcggtaacgcaacttttgccaacttcatgtcactaatgcgacagagccctataaagagccattttgctgaaaagtgtctcaataaagtttagatgtggaaaacgtaacgtcgggatgagacaaaacaaactcagtgagacaaaaatacagtctcactgagttgtctattttaggtttactcaaacaggataacagctactccttctctggagtggagtattttatcttactaaaaatgaaactctcaggggcggaaacataatcctggtaagctcaatatcactatcctgttattatgaccggggtaacattctggctttgatgatatatcggtgagatgttccatattgttctgggttgtccatataagaccttccttcaggaaggtattgtaaagatgttatcttcatcctgttgtataatggaaacgtcacttcaccctcggaggcatacaatccttcagaaacaccggcgtgtcctggctcaagatcaaagtgccacataattgttttacctgacacataacccattttaggatccttagctgtagacattatgaggggagattttatttctaaatccattgatttttgtacagtatcgctcttaccttcagattcatttataaactcagcaagccaagaataactattagatattactggcgtgtctccacggaaggtttcgttcacatctgctgaatgatacccagaccattcagcatcaattttgcccagagttttctgaacctctataaacttgtcgtgactaatatctcttgctgccggcttcatgtttctaccaatttcagcccacttgcttataaagttgtccatatcgataattgaatcataatgactgatattaagcttctgtaaggctattgtgaatgaagaatagtatggatattcccccccttgctgtttatataaagcggggtcttccttaataacccagtttttctttgctccattttgctgcccgggcatcgatggtggcggcggagggtttcctcccgccaccggtggcggcggcggagggtttcctcccatcatcggtggtggtggcggtggatttccccccatcatcggtggcggcggtggaatcatagtattgatagggattcttccatcattgtccttccacgccaccggattattccgcaccatcctgtacagattcagcccgtccaccgagcccgccgggtctgcacttagccatctgcccgcccacggttggtagtaccggtaaccgtagtagtacagccccgttgcgtcccgctccttgcctgaatacctcacggtcttgtagtttgcctccaccgcgctgcgaaccgtccataccgctgtcccgccgtacggatagtattcctccatgctgataagtttgccgtcgctgtccagctccagcacgctactgccggtcaggttatcgtaactgtaacgtaccttgtcgtcagtgattccatccggcctgccgctctcccagtgcagcatccgcacctgcgcacggctcgcctcacccacagtgataacctgcaggctttccgtttccgtatcgccatttttcgcgctgcgcagttccaagcccggaaggtacagcgcccgctgcgtctgcgcgctgttaccggttttctgtacactgaccttcagaatgcgctgactaccgccgtcatagcggtaattctcgctgtcatccgcactgccatctcgcatcaccggcgttaccttcaacagctcattacgtgccgtccagaccaggcccagccccggctgtagctgcgtctgctggccgcccgcagtgaacagtgcgtccacgtctgcggcgttttcggtcaagttgctaagcacagcccggttgctgcggttgcttacggtgatgttggttgtgtaaccactgcgtgttgccggggaatggcgtatctgcgtcaggttgctggcttcgtcgtaggtgtaggtgcgggtgtaactggtatatgcggagctgtctgtaggaaaggggacggtagctgacggtaaacggctgccctgctgtccgacgtttgccatctcgcgcccggtggcactgaccagttggtacaggctgtcgtaggtgtaggtattttccggcaccactttctgattactccagaagcgggttgcttcagcatcattggtgattttcagcacgttgcccaccgggtcatactcatagcgcaggtcctgcagcaccttggcacccgaagcgtggccggcaggtcgctccgtccggatgccggtcaggcgctgcgtctctgcctcgtacgtgtacgtgatcaccacgccgttgccgtgatcctcgcgttgcttctgcccggcggccgagtacgtcagggacttcacgataacctgttccgtacggtccctcaccgtcagccaactgcctgacaacagtcccgccacgtcgtacctcacgcgctgaatattacctttcgcatcggtggtggtcagcaccgtcccggtggcgtcagcagtggtcagggtgacatactcctcgccactgagcagatcattccatgcagaggcaccttctccttgccagtcagccacggtgtccgggttatccgcgtccttcagcagacggcgggtgacggagagcgagacgcctgtcagcgctatgctgtctgtctgcaccagtcctgccgtatcgtaatgacggacgcataatcccgccaggttcagagtcttctctgcgccagtattgccggcatacacgaagcgctccgtgatgcgggcgacttcagtgctgatctgctccgtcacgttcagtggtcgacccggaagcgccgcatcctcatactgccaggtgcgggtcaccgccaggcttctgtcctcagtgccctcatcggtggcgctgatatgactgaccacgataaacggtcgtccggcgacgtcgttcagactgacgctagtaccgttatccgccccctgtgtacgcagaacgcctccggccaggtccgtcaggtagctgaaatttacgcgaccggcgtcgtgcagccgcgggtcggcgctctgcgtcagaaagccgcgtgcgtcgtactggtggggtgtgatgcgttcatttgtcacctcaggggcatcagggtggcgatggtacgcgatgtcgcgcgcggtcaggccgcggttatcaaagaccgtgaccttcggggttctgctgaacaacgatgtgctcatggtattctcctgtttatgatatgtagccggtcaggctgcacaagaaatagctttgtcgcagatttattaatggtcaacgacaataccgcgctctgccatcatctctgttgggttgcgtaaactcagtgagtaaaccagatatccgcggccacactgaacaataatatcgatgggataatgcaggcgacggaagacgtttcggatcagagaaatgggcaggtaatattacaaaaaaaacagcatgttatataacaatgccttaatgcgacagagtctccgcgagtgcataaaattataactaaaatagaatctgcacctgatattcaaccacaggtgcagatgttatttattaaaaattaaaaattaaaaattaaaaattaagctagctgttcaagtcgtaaattattaatgaccttatactcctcggcctcgcccggataaatcatgagaatatccatcggtagatcgatgcccggcgctataacattgccctttgtactatcaaggaaacaccaaccattgaccgacttatctgtattcagctcaatccaactgctgtttgcattaagccaatcaacatcaaccatcgcgccttctggcaataagaaggagagctgccagctgcgaacctgcaccgaagatgaagtcaggaggaaatgatagctatacaaaaactctggtttatcccattgcttacgccagtgagatttatactcttgtgaaacatccaaatcgcgctgctccgtcacctgaatcaccgagctagcctgactgtcaccgttatttgtgtagccgtttggcatggtgagttttgctgtcatcgttgccgtccctgggttttcgcccatcaacggaatattgatattgacagacttgccggcggaaatatcaacggacggagggaaatatcctactgagacaatcgcagaatcggataccgttacgccaacagaaacccctttaatatcagatgattcagagttagaaatgttaagtacattgtaataggtttcgtcactggtcagcaccaaattggatgccacagacatcgtcaactcaacgttaatggcagtcacgctaacccgagtattgatttggttagcaccactattaatcacgccaataggcgtatgcagttgggaagtcaacgaggtcgagccaatcgatttacccgttaaagggattgaaaccttgacagagccattagcgggaagagtgccaattgcggcaacatttcctacagaaacaacattgttgttagcagaagagacatccagagttaacccactcacggcaatattacttttgtttgcaatagttaattctgcaacataggctttgttcagtgcaaaactgatattttctagggacatcgtaagattaacggtttctaccgggcgtgcgaccaccgactgagttgcatcattccaggttcccttgcccagcggatagctaaccagtgacgggatactttcaccggctgccaccgacagagtttccccgtccagataaagtccggaaaccagcgtaccattctgcgacattttgtttacgacactggagacgccatcatgaccgcccacatagaaaccgtacgactcaagctgctgtcgattaagttgaatatcacgtgaaataatgaggatatcacccaactcctgctcattgtaattaatattagtgtagagtgctattttacccgctgggcacttgttttcaccacgagcatttttaataagctgaatatctgacataataatagtccttgttctgaataagtaagcggaaaaggcaaaggtatgaaacctctgactaccgcaatatgattaggtaattaaaaattaaaagtagaacgttacaactgaaccaataacatactcggttcaattaattaataaaggtatttgcgggaaattaatagtagttaattacttatttggagcttgagggcattttataagacaatcattttttatataatggttccatatcaattgctcggactctttcgtattaaggtgctgtcatataatatgctgttttttgtgatattacctgcccatatctctgatccgaaacgtcttccgtcgcctgcattatcccatcgatattattgttcagtgtggccgcggatatctggcttactcactgagtttacgcaacccaacagagatgatggcagagcgcggtattgccgttgaccattacatgttgggatgcagcttatttcgacgggcaaagataatcctggccgggattgaactgatacataggatacgaaaagggcaatacagaacctgcaaagtgagggattatcacccgcggaacactcaataaccgataacgaaacttttgccaatttcatgtcactgatgcgacagagcacaattccaggcaccagattttaggggtgaaccattgacaatgagaacatctgtctgctatttcatttgccaggttttacctcccgtaaccgtacgatatcgggatggagaatctcactgtaactcaataataagtaaagggaattagtttatgaagaaatcatttattgccttatttctaacattctcaggttttgccacatccgcgtatgcacaagatgaattaacttatagcaaactgatgatgaatccagatataaagacagagtttaaaaagatgattgggaaacaaaagttgcctaagtgggtcacagaaggcggcacgtattcccctggctacaacgttgagatcggtgggaataaatatgtggtaatgacttcatgtaagccccatgattgtgcttcacaacgtatcgctgtgctctattctcctgaatcaaaaagattagcaggtgtattttctaccactgacgagatggaaacaaaccaaaagctgcagtggctgagtattccagatgagttgtctattgatggaaaaaccatcttattcgcggcactgacggggagtcttgataatcacccaaatagctttaacttaaagtaaagtaggtaaaggtggtgggtattcgtctaccaccgtactttgcccaaagcgctacattaaatcaggtcccgttagtgctggaagtatcaccaaagacgatttacaaatatattccagcagccgaacagggggaatgacgttttgtgacgccaccataaagtggattagtcgatacgcaagctgggcagtgccatgtcgtaagatattttcaaacttgatagttggctaagagcgaagagcaggtcttaactcttcgcatccgcaacatagattgtcatcgacttaatcactttaacagtaaccgtacccccagaaatgccatgaatcctccgcttaatttatctataaacttgcggtatctaatgtaagcctgacgtggtcggtcggttgataataagcatgaaacaagtgcataccagagcacatcaataatgaacgccattaaaggcaggataatatacatggcaggctgaatattagtggtaagcgctgcggaaaaaatactggcaaataccagagcggtatgggggttgctgatttgggtaaatacgccagtagtaaaagcttttgatatgctgatatcctctgtgcctactgaatgggtaattctgccggaaggacgacgaaacattttcagcgccagccacaaaagataacaaccaccggcaatcttcaggctcgtataaagtgacggaaccagagtcagcagggtatgaaggcccgctaacgcaatgaccgcaaagacaagcgcaccaaagcccatccccacggccaccgctaatgccgcacgtctcgaactggacatggctgttcgcgcaacgagcagaaaactggctcccgggctcattgcacccagaaggatagccaagccaattgcagaaagtgcaatcaaatcatatgtcataattttactccagccatttaatttacccttcagttctctcattgcgtgatccgcgcacctcatgaaccgagctcaatttcaacataacacgatgtcacccacttccgctttcactcaagcggacatcctggcctattagcttgagtgatgggcattccactcatcacgagtcatttcccacaactctgagtccagaaggccgctgacgaactgtttcttttccgttttgattaggcgcataccgctgctgactgaaatgctctgagaacggagatttttagttgcttttggagcacgcaatactgccctgttcaaagtgttaaaccagtaatctgtcgccgcaagactggcttcgcgcattaatccgcgcccctgatattcaggaaccagccaaaagccacgattattatcttcttcatcatctaggcagataacacctattaaattgtcaggattatcccggtgccgtatggtccaaacccaggcgactccttttgccatagctggcagcgcgacgttattaacatagtgcgctgcaccatcgtcaggatagggccagggaaccgatgccaccatataacggacaatttcccagcgtggaaagcgttcttgaatttgtgatgcatcctcagcaactattggctttaacagtaaacgctctgtttccagcgtgggtacttgcatggctcttttccttactggttaatatatccgtgaccattttttactgattcaatatttactatgatttatagggatgtacagaagatattcaggtaatcgggtggaagaccagaacccgctacgacgaagcgaagtttttgctggcacttgaagcgcgacgctcgcctttacttaggccataaaaagcttgttggatgtctcagggcgtgaagcggacttttagtccaagggtataaatgtatttctgactgctaaaagacatttataaaaatttaatgtcttaccctagagggataaaattacttgatcaaggcatcgcgcatgtggcctgcctcctccaagtaagatgggaaagcgcgtaataatcatttggtcgatcagatcttcattgaggaaattttgaattgttcgcgccccgtttcagggaataacagaaagcggagcggccgcgacgaagggcactttatggctttcccgcagcgtggctcacattcaatgctcaacggtgaccggcctcactattaattaacatactgtggattttgtcatgaccgcttctggcacttagcaggtggtcaaatctaattaacccagagtagaaaagggggcagactaaatactaatcagtaaaaataaatgccctgattcattgccaaaatattttctgataagaaccaatgcctttcctagaaaccgtccaaaagccatgactcagcccttcacaagcgataactcataaattatgctgtatgcatatacagtttgctgggctttcatcatgcgttttcactccctctcgccgctgcgcgaaattgttcctatcccgttgtttaatgcaacgatcccggctggctttcccagtccggcggcggattacgttgataggccaatcgatctgaatgagctttgtattgctcatccggcagcgacttattttgtccgggtgaccggtaattcaatgattggggcggggatttttgacggttcgctgctggtggtggatcgcagcatttccccgagccacggcgatattatcattgcctctgttgccggtgaattcacggtcaagcggctgtgcctgaggcctgtcgtacagttagaagcgatgaatcctgattatccgccgatagttctgcacgatggcggggatgatttggaaacttttggcgttgtccgtttcgttatcaatgaggcatccggtgtttgccctggctgatgtaaattcgttctatgcgtcctgcgaagccgtattccggccagatttgcgcgggcggcctgtggtggtgctcagcaataatgatggctgcattatcgccagaaatcaggaagcgaaggctctcgatatcaaaatgggtgggccatattttaagcatcgacagcttttcgagcggcacaatgtggcggtattcagcagtaattacgagctttacgcggatatgtccaaccgggtgatgactgtgctggaagatatggctccatcggttgagatttacagtattgatgaggcctttctggatgtcagcggcgtaagcaactgcatgagtctggagcagtttggtcgtaacgtgcgggcacgggtattgttatggaccggactgaccgtgggggtcggcattgcccagaccaaaacgctggccaaactggcgaaccatgcggccaaacaatggagcaaaaccggcggcgtggtggatttatccgatccgctcaggcaacgcaaattgctggcgataacaccggtggaagatgtctggggaatagggcggcggatcggtaagaaactcaatctgttaggtatcaaaacggcgctgcaactggccgataccagcccacagatagcccgcaaacatttcagcgtggtacttgagcgaacggtgcgcgagctgcgcggcgaatcctgcttggcgctggaagaatttgcaccgaccaaacagcaaattgtctgttcccgttcatttggcgagcgaataactgactatcaggatatgcgtgaggcaatatgtggctacgccgtgcgcgcagctgaaaagctacggggagaacatcagtattgccgaggtatctccgctttcatcaaaaccagcccctttgcggtgaatgaagcctactatggcaacgtggccagcacccaactctatacgcccacgcaggatagccgagatattataaccgccgccacgcgttgtctggacagtatttggcaggatggtcatcgctaccaaaaggggggcgtgatgctgggcgatttctacggtcagggcgtggcacaactcgggttattcgatgaaaactcgccgaaagccaatagtgaacagctcatggcaacgctggacagaataaaccagtcaggcaaagggaaaatctggtttgctgggcagggcatacagcgcgcatggcagatgaagcgagacatgctgtcaccggcgtacactactaggttgcaggatttattgaaggtgagggcttgatgttgtttggattcataggctgtttttttctgcatatcctgtgcccagtttccggctaggtattcccgctccgagtaatcccaccgagatcacggcgattaatcagtcagccgattacggcgaggatgacccaaccgacgacgatacgcgtttttatgtggaaacctacgtcactttatggttaagaagggccgctggggccggtatcgcaagaggtcacgatcacctatcctggcagtagtgtgggtccgtaccccctgaacatctcagttcccccatttactcagaataaaagggctggctacagtgatgtccagccggtggatattccccatgggcgctgggtggatttgcggttggagaggagggaggttaagctttcgtccgttggataaaaactgattaaagcgagcgactacggttatctaacatagatacttatttttaaaaggaattaaatgtatggatgagcaagagctaaagaacacattattgagtttggggatggataatgtcgatgccactctattgatcaagatagcaaaaaataaaaaaaccagtgtaagtcgagttttcattatgagcctgctaggtttatatatggggactgcaactcttattgccatatattttttatttacatataaaatggagaagaacgaggtgttgatattttcagtatcttacataccagttgtgttaataatttatttcttcactccatctttaaaaaaattattttggagtttgaaagttttagttgcgttaaagtggaattaacatgagtggttttgcgattaatactcaagaaagaaaaagaggatacaactcgtatttttcataggtctgtagctcatgcatattattgacataccccccagaagtggttttattaatagtgaaacggagttagttactgattatataaatgaatttaaattaggacacttatcacttggtgaggctacgtctaagcagcatgaacagtacaaaatattggaagaaagatatttttatttaatagcgaacaatgcaaagttacttgctgtaataaaaagaaaaagataaaaactcagttagcaatattgtcttggcgcaggttggtttcgttagtggcgagttacaagtaataggtggacatggtctctgtgcagcaagtatgggtgccgtgtgtgcttcatttggggcacctctaatggttcatgaagcagaaaatccatggggaaatacacattatttagtcgtgtgggaagaggttattattacatcattagaaaacgcgtatatctatgcggtagaaaaatcaggttagacaaaaatagcggaaaattgccactctatcggagatagagttctttctatgggggctggattcagacatgtactcaagccagatgcgtggaaattatttaggtatattaagaatgattctattataggataggaatactatggttgctcctgttagcccacaaaaatattgcaattcctccgtatctacggacatattctatcccgacgtcaatcgaaatattttttagacaataactcatttcctttttaggttgaactccatttttaccatcgagataatgtgctaatactcttgtttatttaaaataatacaagctatttggtgtctttatcgcaaggtaaaaacctaaaaataggtcaattaaaatagcaaaaacaacaaaactaccggtaggctcattggccaggttaaaccaataagaagcgcagtaaaaatccggattttccatgagggatcaacgctggtcaccagggtgataaccgtggagagggccattccaacccagtagatcatttttaaagcgatccatgcagatgacattgtaattccaaagccttgttaacgtacggtgacacagcaaataattaacaaagattttacgcccaccgattttagatcgccagccttaatcaggacgaaaacgtacattcgtatttttttctgttcaaaatatgcacaatacagatttccatttctgcacgcgtcgaaaagtccgttgggagtcagtctaagttttgtgataggaattattgcaatgatcggaacagcgtctaaggtgaataggttatgtaagccgtattcccgatgacttctgaccatggataatcctgtgattacactttattctgacgctgatttttttagtccgtatgtaatgtccgtttttgttgccttaaccgaaaaacaacttccttttgagctgaaaaaaatcaatctttcggataatgaaaatatgcagcagagttacgcccaactctctttcactcgccgtgtaccaactttgattattgatgacttccgaatttcagaatcgtcggctattactgaatatttggatgaagcttttcctgcccctgcttatcaatccctatacccgaacatgatgcagcaaagagctaaaaccagagagattcaggcgtggttacgcagtgatttattatccatacgattagaaaggcccacagaagtgctgtttggtgggatgaagtgcccgccgttatcgactattgccagtaacgcggcggataaactattcgcagccgccaattggctactggctgatggacaggataatttgaacggagaatggtctattgccgatactgatttagctttgatgcttaatcgtttagtgatgaatggggatgatgtaccggctaatttacagcgttatgtgtcctatcaatggcaacgcccttcagttcagcagtggttaacgctgtccaaataagccactacctattcgtgagatcactacctattcgtgaaatagtgaaggatgtatttcgtggctgtcagctgcaattatctgatgacgaatattgaaactgtagcagcctgcatttagatctaaggctgtatttccctgttaattattcaggatacctgaaccctgtaggttgggttgccgtcttgggtaacttggtaggcagtgacatgcagacattctttaatgatcacactgttgttttttaatccggttcgagagataaacgcctcacctccaataccggataagatcagtctagccgacgggccgaaaaggttgatttttgctcgatcattttttgtctgcgtcagacaagttactttatttttgttcattttaacttcgatcaatgaaagggtgtcgtccgaatttactaaaaagaagtcgggcactatccgctgaccctctgggttttcaaaacgaacctctcgtccccagcttataatatgttcgttgcgacataagaataatgctatttctatttgtaaccagttttcccaaccggtgatatccatatcgctaattagtcgtagtttgtgtttaaaatcgggatgatcaaagaaagtcttaagggctagtgcgtaactcattgaagctccatggcgaatcggttaattattaagtcagaaaaagggccgggaagcgtagtgtaaatcgaatttatctggcgttatgcgataattaacgcactgtttatcggtatttttatctcttacaatcggtgatttgctctttgagagtgtatctgcaattttatggcgatgagaatcaaggctgaaaagtgagagaacaggtcgctagagcggcttggaagtactgcgagagaattctgaacaattagcgctgccggagattgtatcttttaccgcgttaattaatttacgttctcaaaccgtgatggaacgtttagggttggagcggcagaaacccgattttgatcaccccggcgttgctgtaggttatccattacgtaaacattgttggtatcgtgtgacgtgagaacagtggataacacgctaaacgacttttctgtcatggtgaaaaaagtagtatattgatagataaagcaggctagcgtgtcaggcggaaattaaaatgttcaatcgcattaaaacggcacgttttgttagcgtaatcttagcgatcgttttcctgggcgcctgtagccaattaccacgtaaccctttgccggtcgaattaatggacgaagctgaaattcccggtatgccaaatattcgcgcggctgctggtcatatcagcccgatcttcgaagcagatttattgcaatcttataaagatgaacgaccggatcaattcctccgtcctgacggtcagcgagtctatccgcatttagcgctatccggcggtgggcctaacggcgcatttggcgcaggttttttaaatggctggagtaagaccggtaagcggccagtgtttaaagtggtaactggcgtatcgactggcgcgttaattgcgccttttgcatttttaggcagcgatcacgatcaggcgttacacgatttttataccacgacgacgacgcgagatatatttcatctcgataacttattattccgtcttttcttccgtgaggccctagcggataccagcccactgtcacagctaattgatggccatattactgcgcaattattgcgtgaaatagcggtggaatatcgtcatggtcgtcgtttgtatatcggaacggtggatctcgattctcaacgcttttttgtctggaatatgggctgctcgccacaaaaggcacgccggaatcattaatactatttcgcaagataatgctggcatcgtcctccgtgccggtggcgtttgctccggtctttttcgacgtggtggccaagggtaaacattatgacgaaatgcatgttgatggcggcgtcggagccagagtgttttataacggcggcgtattcagcggcaaaattgtgcgcgccagagccggtattacgaatagcaaagaagatatttatataatccacaacggccagctcgggccacgtcctgaacctacgcctcgattggttcggaatattgccatgcgtactttggattcttcgagtaaagctacggtggtcggggatttataccgtatttatgcgttctccctagccgagggagccgattttcattggatcactattccatcaaatcttgatatcaatggagccgaaatctttgatccagtgaagatggagaaactttatcaggcaggctacgccgaggcgctgcgtggccctgtatggtcattgcgaccgccgggaacgatcgaaatggatgtgctgctcagcgaggccgcggcacagcaggctagcgagacaaaatgacttcactgaccgactgtggctggataacggctgaacgggcagatttattgttgctgaaaggggttgttaatgtaccagaatttcaacggtgaactgacttgggctgaacgccatatgacacgtacgctggccgcagtggcggcattaccggatctcagccaggtgcgtctggcctgtaacatgcacctggatttgaaaatggcaccgctggtggccggtttattgagaaagggggcgcgggtttatctgacaacctgtaacccgacgacggtacaaaatgatgtggtggaatatctggtatctcaaggcgcagaagctcacgcctggcgagacatgagcgctgaagaatggtccgcttcgttcgatcgggcgctggcatggcaaccgacacacttatgcgaaatgggcgctgatttaacaactcggctgcatcagtctcctgatgggcctaaaattaaagccggcctggaagccacgggctctggtattagccgtttacaaggtctggctccgcgttatccgatttataactgggatgatttgccggtgaaagaggggctgcataaccgccatatggtggggctgacggcttggcatacattcttccaaactacgcatctaaccttgcatgagaaaaaagttgtggtgatcggctatggtctggttgggcagggcgtggcggcatcggctaaagcgtatggtggtcaagtatctgtggcagaaatagatcctgccagagccttacaggcgcgttatgacggctggcaggttgttgatttggctgacgctgtcaaagaagcggacgtgattgctaccgcgaccggtgcgaaaaatgtactttccggcgctcgtctggctgatgccaaagatggggtgtttattctcaacgtgggtcacgttgcagaagagattgataccgctttcttaaaacagtacccgagcagtgagccgatgcagcacgttttcgcctattcggttggagagaaaactgtgtatctgctggccgatggttccatgtttaatttgaccgcgggttatggcgatagcctgaatgcttttgatgtcacactggctgtgatggccgcggggattgggcatattgttggtgcaggggagtctgcggaggcggcggtgtatttattaccgcagtcagcttggaagtcggtgctctaacgcaccttgctgatatcaacgggggtcgatggatttcggtcggccgccggatttattgcaaaaagaaacggttgagttatcgattgccgctgccgccacatagacgatgaacagcaggtataaaaagagattattggtcatgttgcacctccattatcctgaacggataacgtctctgaatactgactgtgacatcatatgagcgataagtgaacaaaaaatgaacagtcagtgaaagattaatgacagtgaggcgagtattagcaatatttctaatgaagaaattgctttgatggagaattgtttagattgaattggactatttatcagacacttggtgtaatttaaaaacaatttaaccagcatgtgatcaagagggcagtgattgtgctacactatgcggccgataatcaaggataaatcatgaaaaaagtctcaattattgctcagtgcttagtaaatgctaagagtttcagtgagatgtcagaagctgaatcctcgatcaaaaaagtattcaatgatagctatagcgatcactcatttgacgaatggaataccgaagtttccgcgttgagtgccaagcgagttatcagcctggttgctgggtcatccaaggttcgcgtcagaggtttaattcaggaactgtggaatcactgatcctgctctgatacttaactcctctctgatttttcactgcgtagagcatgcctgtcatgccacgtggtgaaaagtagaccttcctgttgcagcggtaactcaccgccgttctctcttctcgggctggcacgatctctaaactgctttataaagcacaaattttaaccaatgacggcgttggcacagtttctttggcgcggttcacgtaacttcatgacatagacaaccacgaggtaagattatgtcattgatcgatagcttcagaagactgatcagcaaggctcaaactaaagtcacttgccctgaatgcggtaaggcatctcagcaggatacagaaaaagtgcagaaaaataaggcgttggtttgtctaaagtgcggcagcctatttttgcccagcgatcaaaaacgttaaccaaataccatcgctgcccagcgtaatagcagcagagccaggcaaatgcataacagtaccaggaacattttccagtgctttttatgtaatcttttggttaccatcattttcctcttatctatctggttcatttacgtcagtatagtaacgaaaaactatgctgatgagcagatatactctgtgcgcattgcttgagataaagtgtaatatgcgttgtatcaataatgtaagaaatagaattcgaaataaggaaaatcatggccactagccttcctcaaaaatatgaaaatgctgagcgttgggcatttggtgatactgaaagcgtcgcagatgagctattggcgctggtattgcaaggcgtaaaaacggccacttgtgcctctttagatggagatggcgtaccgcaggtgggcgatgtatttgtggtagtgaatggaaaaaatgtgccggcctgtgccgttgaactgacggaagtggatctcaaaacctacgatcaggtcgatgaagcacatgcttttgccgaaggtgaaggggatcgtactctggcctattggcgtaaagaacatcagcgcttctttgaggcttatgatatgttctcacctgatatgacattgatctgcatgaaatttaaagtgattgagacgttttgattttagtctgaaaacacgacttgttcggcaggaatgaataatctaacgattcgatacgaatactgcccgataagggttaaaaatattgagggaaaacccgccgtctgtcacctcgtgttattcgacggacgggttttcttgctaaccaactatgtcatcctcattacccaggcatcctgatgccgatcataatgtttcttatacaacaacgtttgtttcccatccaagagcgccggaacgctggtgtggtcatcccaaccgtctaattgcgtgcaaagatctggatctgatttgcagggaatactaagcgtattttcccctttggtctgctgaggggatatttgcgcatcatcaatctcaaaactgcctatttttaatactgactttctcattgaaactcctggagattatggtggtaggaggtgtgaccagataaggccgcattattgagaatagccgaggttattaaaagcgccaaatgcagacgtagaaaaatacgggtttttattcggccagtttctggatgttatattggttacgcccattatttttcgagaaatacagtgccttatccgccgctaacagcagatgagattgatcgatgtcgggtgagtgcactaatggatgataaaaactggcaccaatgctgattgtcactttctggaattcgctgtccgcatgtttaatacccatgatacgaatggattccaaaatatgtttagcgaccaacgctgcgccagcttcgtcggtatcggggagaattgcggaaaactcttctcctccatagcgagcgacaatatccgtactgcgttttagtgattttcttaaggcgcgggcaaccaatctcaggcaggcatcaccagaaacgtggccgtagtggtcattaaagtttttgaaataatcaatatcgatcatcaataatgccagtggcgtatctgtacgcttggcacgtagaaattcgtgagataaaaccttcttgaattcccgtctattcggtaatttggttaatgagtcagtgcgtgcctgaatctccagacgtcgattggctttaaccagctttagctccagcagcttacgctcatgaacatcttccgccgtgccataccagcaaataacgttaccgtcagtatccaggcttggcgtggcgcgaattcgcatccagttccagcccttttcaacgtggcaaaaacggatttcaatatcgagagattcgccggtgcgcagcgaatgctcccaactgaccagcgcgatatgccgatcctctgtatgaatggttctaacccattcatcttccaaggcctgtttgcgagtaaaaccggttattttttcaaatcggctgctgatatcggtaattcggccgtcgggtgccgcggtccagggaatttgtgggttcagctccaccatattacggtaatgttctttgctactgcgcagcgcggcttccatttgtttcaggcaactgatatctatcatggcgacggataatccggttacccggccttgggtatctcgagccgctttcatgcgaataaaaaaaatgtgtttctcgccgggcatctgaaattcagcgtccagaatattttcgttattataagcccgcagtagagcctgacgtagaataggaacaatgctcggcatgatctcaaccacttttcgaccgttaatttcattggcgtgtttacctaataaattcgccaaataatcgttaatggtgacgtagctcagagtggtatcaacaaaacataatccggcgggagcgttggaatagatagattctaattcaaataagcgctgtggggcgttgataggaaaatttgtcaagtcgcgatctatacctctataacctttgaattcgccgtgctcatcaaataacggaactccgctggtttcgagtaagatttcagaaccatcaatgcggagattacgattttttaaaccagaaaaagggcgacgctcggcgctgattttgctgaaaacatccatgaatcgctgtgcttcatccttgggcataaaatcatataatgatttaccgataatttcatggggcgctcggccaaagaactctaggcatttagaggatgaaaaggtgtagtgggcattagcgtcaatttcccaaatccagtctgagttattctcgataatatcgcgcaacttatttatttgttggcgtagagtcgtcgtcaaagactcatttttattttcatcatctggcatgatgtcactcctgtttgagcacgacttccttgagtaagaaaaactgtcaccatattctggcttgctgattgtatatcagccataaaatgaatacagcttattaggagtaatctgagcggctggtgttgaattaatccactattttataatgacaaaacattaaccaaagtagaaacataagtaaattttcagaataatgttttgtcagctttaaatttatcagcacactcggtagggaaactaaatatttaggcgttaatgggttaattcattattacagaataggctaaatctgtattaattactgcgaactcatctctgcgtttggacctcggtggttcattgatttttattcattttttatgatgccaggtaaaacaccagactgtccatgctacgaataataggtgacgttatcattttttgttatatacaaagttaattcttttgatgtgttatcggaaatattgagcggttttaggctaaagctattcatctaatttaagtgttcgtcaggttttaatatgaataattggtaatggattcttctataaaaaacgagtttgaccgaatgtctatgctgacagggttaggattttatgccaaaaagagattgattgttgcagcgttcagacaagaaaataatactcggtcaatatgcagagaaatatggctagaccataattagaatgcgtaatgacaccctagggctttcatataatcatcaaggagtctgactcgaatcttgtttacctcaggtttcctcttcttcttttttagcatatcggattctttaaaaaaacgccggatggccataaacgacctatccggcgagcttatttagagaggctagaagcgaggaatcgctgtaccccaattgcgccaatctttaggttcttcagtattcagcaagaaatgctgattgaccgaagccttcggtgccaatggcgttgtcggtggcgttgcaaaggcgataccgccgcgaataaattgctggaaggtgccgcttttcactacgccgccggttagaccaaactgtaggttatagccggaagccagccagaacacactgttttgccgaacgagctgttggtatttcttactgattcgcagcgaaacctgtactcgatctgacatcgcgccaagattgaatccggtgaccgtaccgacctccattccgcggaacaagaccggcgtgccgatctgtaatgaaccggcttcggcagtatccagcacgatgctcagaccgtctagatagcgcgaatcagtaatggtagcggtttgtagttcgaaattacgcaatgcctgcccacgccccggttccacgttaatatacggctggagtagggtgtccaggttattgacgccggcggcggaaatttccggtgaaacgatagagaagcgggtgccgaagcgagcaaagctctccacgtattctggataaagtaccgctttggccagaacttcgttgcgctcggcggacaatttcagcgattcgacctgaccaatatcgattcccagataacgaataggcatacctgccgccagtttgctggcatcgtaagtgcgtagcgtaatttggctccccacggcgcgggcggcggtttctgtggcatacagggtgcgtttaacgcctttgcccaaggttacgccgtcgagattatcgaagctaatggcgcctttgagtgcccggttcaaaggcgaagcttgcacggtgagtccgctgccgtttaactgtacttttgctccgccctcagcccagaagatacttttactgctcaacaggttacggtattccggctgaatataaacatccacctcaaactcattggcttttgggcgaacattgactatttcgccgacctgaaacttgcggtacagaactaccgagccagtttgcacgtcgggcaagctgctggccgttagagtgagggtcgtcgcaggcaggttacccagaataccgtcttcagccttttcgcgactgctgtagagcggatattggcttttcggttcacctttacccccggccagcagctgaataccgccgtcaaaccattcttgtgcgctggcaccctgaacattgatgccatcaataccgattttgacgtcgatacggctgttaaccacgaacttgctatcgttatgcaccaaatgacgatatttggcctcaatggcagcggtaaaggtgataccggaatcatccagcgtgcgggtaataacctgcccgattttaatgccgtgcagcacaataggttgcccgacatcaataccgtagctttgcggcgcggtgagggttaacttcagtacatccggctgctgtaacaggcttttgttgctatctagtacgataaagtgctgttgcggctctccgtctccgggaaccagctctagcgtattaccggtcaataattcactcagcttggtatcattgaggctgatacgtggactgttcatttcgatacggctgccggtacgcataagatcgacaaccgaaggatcgatggtcagttcgccggtgaccttactgtctggttgcaataccagtttggtcaatgtaccaacctgtaatccctgataaatcagcggggtacggccttcagccagattattgccattgggtaaatccaaggttatggctacgccgcggttactgtgggccaaatcggggtacaactggaactgttgatcggttttggcatcctggctttgctgcggtgaatcaaaggcaattgcgccgttaaccaaggccgccagactctccatctggactgacgcgccgctcaggctaaaatcgcctttaaaacctgagacattccagaatcggctgtcatttttcaccagatgagcgaagcggcgatcaatcagcacgtcaatgattacaccattgttatccggcgcaatgttgtaatcataaactttgcctaccggaattttgcggtagtacaccagagaaccggtattgagagagccgagatctttggcgttcaaatgaatcatcagctcgccggtattcaggcggaatttgggttgagtatctaacgcggtgaaatgggtttgcggtttaccgtggcccggcatcataccgatatagttaccaccgaccagtgcgtctaacccggaaaccccggccagagaggctttgggggtaaccagccagaattgggtcccttctcgcaacgagtcttccaaatcgtttttaatactggcagtcacgacaatgctgcgtaagtctttgctcagactgatggattgcaccgtgccgacttcaaccccttgatatcgaataggggtacgaccggcgacaataccggcggcagattgaaaatcgattgtgacttcagctccgcgatcttgccagttggtataaaccagccagcccgcaatcagcagagcaatgaaaggcagcagccagaagggtgaaattcggcgtttgtgcctaacctgagcctcagtcggcgtattcggcgtttcctgttgcatgtgcatcccaaatcaatcggctatccagccattcaacggcaagaatagtcaaaattaccgcagacccaaagtaaaaggcagccggtcccatagtgaacgaaagtagctgatctctgttgatcagcgacatcattaacgcaataacgaacaaatccagcattgaccagcggccaatccaggtaatgacacgcatcaaacgcatacgggtcttcaaactgtgctgagttttcaaatgaatactcagcagcaaggtaatcagtacgataactttagtaaaaggaactaatacgctggcaataaataccacggcggcgatcggcatattgccggaggaggccagagaaatcacgccagagaaaatggtatcttccatacgcacgccgttggcgtaaacaatcgagattggcagcaggttggcgggcaatagcagcaccatagaggcaatcaacgcagcccaggttttttgcaggctgtggcggcggcgatggcgcagcggcgtgtggcagcgcggacagcgacccttggcgtcaggatggccggtatagtggcaggagaggcaaacccgcagcgtttcccttggccccggcggctgttcctgcgggtaaaagcgttcccacagttgctccagattcaggtgaattagcgtcagaatacttaataaggttagcgccagataggccgtaagcccaagccctggggaaatgtcggcatattctttgactttgatacaggcaacagccataccgatcagatagatgtccagcatcacccattcttttaatctctccagcatcagtaacaccggccgcaaattcatgccgatacggctaccaatgcgcagataaaggagagaaagcgtcagtgtgagcggcgcgccaaaaatacagaaagccaccatgctggcggttaaggggtcgccttgtttggtcatctgccagatgccttccaacagactggcatcgatatgggtgccgagcagacgaatgctgattaagggttcgctaaaggcaaagggcatcaacagtagcattgctacggccattgcggttaggcgagtcagggaccaatcacggccgctgacgaccttggcgcaacagcatgggcaataggcggcctgattaccttgcattggtggcagggtaaatagggcgtcacattcgcagcagcgctgttctcgcgcggtggaaagagggcggtaaatcgcttctatcttcataaatatctaatcgatggctccgccggtgatgaaaagcccaatagcaatatgggtaaatgccgaaccagggtacagaaagtcgaggtatataatttggagcacattaaattcgcagcgcatcaaattacgctataaatcaaatatagtgtgcgacggggctgagccgcggtttttattctcgaacgtgacagcataacccgttgtgtgaaccctgaaaatcagtcaattccctattgtagggaactcttttactcagttaaagatgattagccttgtggcaatgtacatttaatgcttactttagagaggctaagcaccggttgcctctggctattcttaggtttgttaatggttacgacatgaaaaaagaagaattctacgcggaattaaaacgcgatatgagagcattaattgctggtgagcataattttatcgctacactttccaatgtcagcgcgctgttgtatgagcgcctcgacgggttgaactgggccggtttctacctgatggatggcaatcaactggtattgggaccgttccaagggaaaatcgcctgtgtacgtattcccgtgggtaaaggcgtgtgcggtacggcagtgtcagaaaatcgcgtacagcgggttgcggatgtccacgctttccccgggcatattgcctgtgacgccgccagtaatgccgaaattgtcctgccaatcgcgataaacggcgttgtcatcggggttttggatattgacagcacagtttatgatcgtttcgatgaagaagacgaaaaagggctgacgtcagtcttggcggggctttgcgcccatcttgaacactgtgacgttgcgaaatatgtcacacagactgcaagttgatacacggataacgtggcaattgctggaggcgtcattataatgacgcctgttcatgcctgcgctggttggcaaacccgttgtaatcaggaaatttcatggaaaatcaacctaagttgaacagtagcaaagaagtcatagcctttttggccgagcgattcccgctttgtttcaccgccgaaggcgaagcacgcccattaaagatcggcatttttcaggatctggtggagcgagttcagggggaagagaatttaagcaaaacgcaattgcgttcagccttgcgtctatacacctcaagctggcgttatctttatggggtcaaagtcggagcagagcgtgttgatctggatggcaacccttgcggtgtgctggaagagcaacatgtcgaacatgcccgcaaacagctggaagaggcgaaagcccgtgttcaggcacaacgtgctgagcaacaagctaaaaaacgcgaagctgccattgctgcgggtgaaaccccagagccacgtcgcccacgtccggcaggtaaaaaacctgcaccacgtcgtgaagcaggcgctgctccggaagctcgtaagcctcgtcagccaaatcgcccacagcaggcccgtgctcctcgcccagcggcagaagagaaccagccacgccctgtgccggtcacagatatctcgaaactgcaaattggtcaagaaatcaaagtcagagcaggcaagagtgcgatggacgcaaccgtattagaaatcgctaaagatggcgtacgggtgcagctatcttcaggtctggcgatgatcgtgcgcgcagaacacttgcagttctgatacggaggccaacctaggcatgaacaaatttgtcagattaacagcattagcaggcttgttactggcgggggcgagttacgctggcgatacgactacttatcgtatcgatcagttacctcaactgcgtcaagagcctcagcactcgacggtgagtgagcgcgtcgcttcgcgcttcactcgctctcattatcgtcagttcgcgctggacgatcagttttccgccaagatatttgatcgctatctcaatatgttggactacagtcacaacctgttgctggcatcagatgtggcacagttcgccaataaaaagaattcactggatgatgaattaaaatccggtcagttggatacgccttatgcgctattcaacctggcgcagaaacgtcgtttcgagcgctatcaatacgcattgtcagtgttggaaagaccaatggactttaccggcaatgacaccatcgatttggatcgcgccaaggcgccgtggcccactagcgaagccgagctaaataagctgtgggacgccaaggtcaaatatgatcaacttaatctcaaattagccggtaaaacggataaagagatcaaagaaacgttgaccaaacgctaccagtcagccattaaacgcctgacgcagagcaacagcgaagacgttttccagctgatcatgaatgcttttgctcatgaaatcgatccgcataccaattatttgtctccgcgtaacaccgagcaattcaatactgagatgagtttgtctctggaaggcattggcgcggtattgcaaatggatgatgattacaccctgattaactccatggtgcccggtggcccagcggccaagagtaaggcgattaccgtcggcgatcgtgtggttggcgtcggtcagaccggtaaacctatggtcgatgtgattggctggcgtctggatgatgtggttgcgctgattaaagggccgaaaggctccaaagtgcgtttggaaatcctgcctgcgggcaaaggaaccaaagtgaaaaccgtcaccctgacccgcgaacgcatccgactggaagaccgagcggttaaaatgtcggttaaaaccattggcaaagagaaagtgggagtgttggatattcctggtttctatgtcggtttaaccgaagacgtgaaggttcagctgcaaaaactggccaagcagaatgtgagcagtattattatcgatctgcgcagcaacggcggtggcgctttgaccgaagcggtctctttgtctggcttattcatcccaagcggcccggtcgtgcaggtgcgggataataacggcaaagtgcgtgaagacagcgatgccgacggcattgtgtattacaaaggcccgttagtcgtgctggtggatcgttatagcgcctcggcgtctgaaatctttgcggcagctatgcaggattatggtcgtgcgctgattgtcggtgaaccgactttcggtaaaggtacggtgcagcaatatcgttctctgaatcggatttacgatcaaatgctgcgtccagagtggcctgcattaggttcggtacagtacaccattcagaaattctatcgcgtggacggtggcagtacccagcgtaaaggcgtggtgccagacattgtgatgccaaccggtgtcgatccggcggaaaccggtgaaagctttgaagataacgcgttgccgtgggatcgcatcaacgccgcaacctacaccaaggttgatgatttgaaacctttcgagccagcgttattgaaagatcatgcggcccgtatcgctgtcgatcctgaatttaagagcattcaggaagatatcgtgcgctttaaggcgttaaaagcgaaacgcaacaatgtttcccttaactatgcgcagcgtgagaaagagaatcaggaagacgacgccacccgtttggcgcgcttgaatgaacgtttcaaacgcgaaggtaaaaagccgctgaagtctttggatgatttacctaaagattatcaagagccggacccttatctggatgaaagcgtccatattgctttggatctcgcccagttggaaaaagcgcagcaaccagccgctaaataagccgccagtgatgcaaaaatcatccggggtctcttatgaggccccggatttttttatggtacgagtgggccgtgatcgtaaaaaacgcgctaaaggatcgccggagtggctggggcggcggagggaatcacggggaaaacggcgcaggaagacgactgaatgtgataaaatatgttcaaatttgtaaagttatgttgatttaatcagttacggcttaacaagccttgaaaatttattagatgcccataggatcaggatatctcaataggaatttcggtaaacggctaaacaaataaggaagtaaaaatttatgatgcgtatagctctgttccttctcactaacctggcggtgatgttggtcttcgggctggtgctaagcctgactggaattcagtcaagtagtatacaggggctgatgattatggcgcttctgttcggttttggtggttcattcgtttcactgctgctgtctaaatggatggcgctgcgttccgttggtggggaagtgatcgaacagccacgtaatgaaaccgaacgctggttgctggataccgtacgtcgtcagtctcaacaggttggcatcgctatgccacaggttgccatttatcaggctccggatattaacgcctttgcgaccggcgctcgccgtgatgcttcgctggtggcagtgagtaccggtttactgcaaaacatgagccgcgatgaagcggaagcagttatcgcccatgaaatcagtcacgtagctaatggtgacatggtcacaatgacgctggttcagggcgtggtgaacacctttgttatctttatttctcgtttaattgcgcaggttgtcgctggttttgtgtctggcgatcgggaaaacgaaggcagttcttctggcaacccaatggtgtatttcgccgtgtctatggtgctggaactggtattcggtattttggcgagcattatcaccatgtggttctctcgtcaccgggagttccatgcggacgctggctcagccaaattggtgggtcgtgagaagatgattgcggcgttgcaacgcctgaaaaccagctatgagccgcaggaagaaagcagcatgatggcgttttgcatcaacggtaaatctaagactttcagcgaattgctgatgtctcacccaccgttggacaagcgcattgaagcactgcgtactggcgaatacctgaaataagccacaaccgcttgtggtgaagcagttagaaagccccgtgaatagcggggcttttttgtgcctttttattgtcgaattttcagcgcgctagctggttttagatgaaatgcgcagcaggctaaccaccgccgccagcgtggcaaaaccgccggcaagtagcaaagaagcataagtagcattgtccgcaaactgatggaacattaaggccactaacgccgcgccagaggtctgccctagcagacgcgaggtgcctaacataccgctggcaccgccgctgcggttgggcggcgcggcagaaatgatcgtgtgattgttcggcgactggaataaaccgaagccgacgccgcagagcatcatgcgccagataatattcaaatcgctcggattggccggaagagttgctagcaggaagagtccgctggcgaaaactgccagtccgatgccgcccaacagacccgcctgatagcgttccactaaccgaccggcaatcggtgcggccacaaccgttgccagcggccatggggtgagcaacagcccggtcgccacttcatcccgccctaacacgttttgcaggaagaacggcagcgacaccatcgccagcatttgtgcaataaaagaacaaatcgaggtgccgacggagagggcaaaaatcgggatacgtagcagatcgacgggtaataacgggaaaggttgcttgagctggcgacgcacgaagaaaaaaccaatcagtaatagcgctatgatttcaccggcaattagcgtcgggctttgtccttgggcaaagccgctaatggcgataatcagcaggccaaaggttatggcattcatcagacaactgacaatatcgaatttattaccgttactcttggctacgttagcgggtaagtatttcatgcccaaacaccaggcgagcaggccaattggaacattgatggcaaaaagccattgccaggatgctatcgatagtacggcggcggcgatggtagggccagcggcggcagaaaaggccacgatcagggaattaatgccaataccgcgtccaagttgggctcgcggataaatgattcgaattagcgccgtattgacgctcatcagcgctgcagccccaaacccctgtaatacccgtgcaaaagtcaacgtccaaagggaatcggacagggcgcagaataatgatgtcaggctgaaaataagcaatccagcctgataaacccgccggtagccgatgatatccccgagggatgccagtgagagcagcgaaatggtgatggctaactgataggcattgacgatccaaatagaatcggccgggctggcattcaaatcgcgggcgatggtgggtaacgctacatttgcaatagtgccatccagtaccgcaatagtaatacccaaagctatcaccaaaatggcggcgtagcgctggggaaccggcaacccatcagtctgagaaggtgtcatatggaattttatctgtaaaagtaatgaaatggctaagtattataatgctaacggcaaaggtggcagattgcatctttgccactcggataattgtcatagctaattgtcataactgattgtcaacgaatgtgtgcaggatgcaggagtggccaaatcatcatgataagacagataaaagccagaaaatatcaatgctattggctaaaacgaaactgcgatcacggaaaaatgaaacatcgttcctataatggattgtcacatgttaaccagctgatgctgccaacatttttcattctctgacgttttaaggattcctcggatggccaaaggtaaactcattccactgacatttcacacctatcaggatgcctctaccggtgcccaaattactcgtttaacgcctcaggacgtgacctgtcatcgtaactatttctatcaaaagtgcttcactcaggatggccgtaaactgttatttggcggcgcttttgaaggggcgtggaactattatctgctggatttgactactcggatagccactcaattaaccgagggaatcggcgataatacttttggcggttttctgtcgccaaacgatgacgcgctatattacgtaaaaaatggccgtaatctcatgcgggtagatttggattcactggaagaattcttggtttatcaggtgcctgacgggtggatggggtatggcacttgggtagcgaattcagattgtactaagttggttggtattgaaatcaagcaggaggactggcagccgttaaccgattggaagaaattccacgatttctatttcactcatccttgctgccgtttaatgaaagtcgatctgcgcaccgggcaatcaacggtgattcttcaggaaaaccaatggctaggccatcctatttatcgtcctttcgatgatgctaccgtcgctttctgtcatgaaggcccgcacgatttggtggatgcacgtatgtggctgatcaatgaagacggcacgaatatgcgcaaagtgaaaacccatgcgccgggagagagttgcacccatgaattctgggtgccggacggctcggctttggtttatgtttcttatatgaagggtagcccagaccgttttatttgcagcgccgatccgctcacgttggaaaatcgccagttgaccaaaatgccagcctgttcccatttaatgagcaattatgacggttctttgatggtgggcgacggctctgatgcgccggtagatgtgcaggacgatagcggctacaagattgaaaacgatcctttcctgtacgtattcaacatgaaaaccggcaaacagcatcagatagcgcgccacgacacctcatggaaggtatttgaaggcgaacgtcaggtaacccacccgcatccttcttttacaccagataataaacaagtgctgtttacttcagacgttgacggcaagcccgcactgtatttagcgactttgcctgaaactgtgtggttatagcatctttgctctggcctccggggtaaaaagaggccaaatccctatttctcagtgtgatatcagattaattatattgcatcattgcgcaatctcaccgcttcctcttataataaaaccattgttctattttttttaaaacaaaaaaacgagtagggtaacgacacaatggctacgaatgattttgataaacagcccgactcagtttcgtcggttctgaaagttttcggtatcttacaagcgttgggtgaagagcgagaaatcggtattaccgaactctcgcagcgtgtgatgatgtccaaaagtacggtttaccggtttctgcaaactctaaagtctttaggctatgtggcgcaggaaggggaatctgaaaagtattcgctgacgcttaagctgtttgaattaggcgcaaaagcgctgcaaaacgtcgatttgatccgcagctcggatattcagatgcgcgaattgtcgaatctgacccgtgagaccattcacctgggcgctttggatgaagacagcattgtctatatccataaaattgattcgatgtataacctgcgaatgtattcccgaattggccgtcgtaacccgctgcacagtaccgctattggtaaggtgctgctggcctggcgcgatcgcggcgaagtggaagaaattctgtctcatatcgagtttacccgtagtaccaaacacacgctggacagcgctgcggtgctattgccagtgctggatcaggtgcgtgaacaaggttttggcgaagatatcgaagaacaggaagaagggctgcgttgtatcgccgttccggttttcgaccgttttggcgttgccatcgcggggctgagtatttcattcccgacgctgcgtttctcagaggaacataagagcgattatgtaaagtcattgcatcaggcggcgcgtaatatctcggaacaaatgggttatcgcgactacccgttttaatgggcggcgtttaatgcattattagctaggtaaatccagcggctcctgattcaggggccgttttttttgctggtttcccccatgatggtaaattcttaaggtgcaaatgatacttatgcagaatgtatcgtttacataccatttagtttacatcagttactgtgaatcgagtttatcaaacgacagggagtgtgaatgatgaaaaaattattgccggcggcgctgttgctgcttttggctgggtgtagcagtagcccgcataaattgatcgatcgcggtgattatcaggtagataccacccatcctgcggtggggcagaacgatcgggtgcgctttctagtgttccactatacggcggttgacgatgcggaatccctgcgattgctgactcaagagcaggttagcgcgcattatttggtgacggaacatccgcgtaaagaaggtggcaaaccggtggtactgcaactggttcccgaagataaacgcgcctggcatgctggggtcagcgaatggcaaggacgtaccagcctgaatgatacctcgataggcgtggaaatcgtcaatctgggctatacagaggagctgctagggcgtaagtggtatccgtttaacgaaaaccagattgaattgattgagcggctggggaaggacattgttgcccgttatcatattgctccgacagatgttgtagcgcatagtgatattgctccgcagagaaagtccgatcccggcccgtatttcccgtggaaacgtttatatgaagctggcattggcgcttggccagacgaagggcgggttcaggaactgattgatggccgtgataaacacgagctggtgccggttgagtctattcagaaagcgttagcgacttacgggtataaaatcccgctaaccggtgaactggatgaggaaaccctgaaggtgatagctgccttccagatgcacttccgcgccagcgatttcagcggcgtaccggatgtggaaaccctggctatcgcacaggctctggtggaaaagtaccgtagttaatccagtttgaagaacccaggtgaaacaaaattgaaaaagccggacagtttacgctgcccggctttttactgattacgataagtgagacatttagcgatgcgctaattccacctcgtcatcactgtttagaatctctttgtcggtttgtttcatcaattggctggtgatggtaccggcagtcatagaaccgcttacgttcaaggcggtacggcccatatcaatcaaaggttcaacggagattaacagagcaaccagcgtgaccggcagacccatggctggcagtacaatcaaggctgcaaaggttgcgccgccacctacaccggctacgccagctgaactgacggtgaccataccgaccaatgttgcaatccaaatcgggtccagtgggttgatacctacggttggagccaccatcaccgccagcatagccggatacaaaccggcacagccgttttgaccaatcgttgcgccgaaggacgcagaaaagctggcaatggattcagggatacccagacggcgagtttgcgcttccacactcagtgggatgctggcagcactggaacggctcgtgaaggcaaatgtcagcaccggccaaactttcttgaaaaatttcagcgggttgataccggtaaaggcaatcaacagaccgtgaaccacgaacatgatcgccagacccagatacgaggccacaacgaagctacccagtttgataatgtcctgaacgttagagccagcgacgaccttggtcatcaatgccagcacgccgtatggggtcagtttcataaccagacgaaccagtttcatcacccaggattgcagggtatcgatagcaaccagtacgcgtttacctttttcaacgtcgtctttcagcaattgcagtgaagcaattcccagcagagtcgcaaagataactacgctgataatcgaagttgggtttgcaccggttaaatcggcaaacggatttttcgggataaaggacaaaatcagctgaggcacgctcagatccgaaaccttgctcagataattgctttcaatcgcgcttaggcgagccgcttcctgagtgccctgaaccagaccttcagcggtcaggccgaacagattggtgacaaatacaccgactaacgccgcaatcatggtagtaaacagcagggtgccgatagacaggaaactgattttccccagcgacgccgcattatgcagcttggcgacggcacttaaaatggacgcaaataccaacggcatcacgatcatttgcagtaattgtacataaccgttaccgacgatattgaaccaggtaatagattctttcattaccgggtcgtcagagccatacaccaaatgcaggccgaggccgaacaccacgcctaatgccagaccagccagaacttttttggccaggctccactgtttgtgacgggtttgtgccaatagcaacagcaatgcgacaaaaatcgccacattaattacgagcggtaggttcatccccaaatctccaaaattctattatgaatactttttgcgtattctatttatattgctgaccttgataggtcgcgaagccaactatcctaacagttactgagttggctcacttatatccaaaaagaatttgatataattttttacgcaaatttgtataaagtatatgctttgggtgatgatttcggcagttaattgtgatcagagtttgaaactcttcaattgctcaacataggattggacgggaaatgagcggtcgctctgccagtaaacggcgtagcatactaaaagtacgcaaaacacgcgttccagctgattccctttttgcgaattgagcagaggcaggcgaaaccgccaacggcacggccacagcagtggtacgccagcaggcgtcagcatatccgccaataaatggctgaaatagccgacgatcatcgcatgcatgacgtcaggtgggataaaccaactgcggggaatttcaagctgaaataacgctattccaccgaggatcgctaataaactgtgggtaaaaccgcgatggccaaaaatccgtgcaataggcgcggaaatccacttcaagcgttgccccagaacagagcggggatggtcaatatcaggtagtagagacgtcaaaagggcgcccggtataatgtgccaccagtccccctgtgtaagctcgggagtcaacccggcttttttggcaaaaattgcgcaggcgacagaaaaaatcaaatgcccttccgcggtcatacaaacgtcccaaactataactgttaatttatccagtatatgggatttctctgggtgaagatagccgttacgctgtaactaaatgtcacattaggagtgattttagggtgaatgttgttttttcagacaatccacagctggcgcgtggctgggcggcggatattacaggaaatggaaggtgaaaaaaacggggaaaagcgactgggagtcagatttttccccaaacacgggtaacaggtttgcagcggcagttactgcaatactaatgatgagtattcaatcaaatcggacatactgaggttataacggtgaccaggttataacgacgatcagaaggtgtactgcacccccacgcggaaacgggtctggcgttcgtcggtcaggctgctgccagaaacattgccgatagccacataaggtttccagtttttatcccatttgtaggccaatttgacatcatgactccagtcatacttttcgttatttgccagaattttgtcctcagattttttgtaatccaactcatattcgacggagtaatctttcaggaagttataggcaaatagcagggtgaattgatggcctttctcagtatctttggtggaaggctggttacgtttgtaataagggcgatagcgtagagacgtagagaaatcgtcagtaaaggcaactttgccgcgtaaatatggccggtagttattgctgtctgatgaggattccagagagaagcccggttccaactggaaggtcttgttaaatttatacacatagctggctaccacttcggtaccattactgacctgttcgtgaaaaggtttgtttgcggtgttgtccgagctgtgttgccgccatttgccttccaaagaaaggccaaagccgttagcgaaacggttagagaacagcagacgatctttatgatcgttcgaaccgctatccagcatttcatgacgataatcgatagttgttgccacagagctgaaactgataactgatgccattgccagagtaagtaatttaaatttcatttttataatccctgagtgatgtattttcgcatcaataaagaatacattcttaaaaaagaaacatcgtttcatttattgtggttttatattctatttattattttaataatttttgtgatcgatgtcgtcattgttccctaataaaataaaagcattttaaacttgtgatgacgatctaattgattgtttttattgtaatttaatcaagcagaaaaaccccgccaaataaatggcagggtgagtttagtgccttattcttcgatttatcgcatggcgcgttttaaaattcggtcaccctgacgattaaaatattctgcagtttcctctacggttttctgaccataatcgatgtattgaatggcgtcgccaaataaagaaacaatttgtggatcatcgaaataaggcgaggttttcatttcgtgcggcaaggctaatgccatatttaggccagatacggacggatcggtatcttgaatagtgccgctggtgcgtaattgttcaaccgccgtcgcgctaagcggcacgccgcgttccaacccaagcgcttccacaccttctttgctgtttagcaggaagttaatcagaatggcgctttctttcggatgttgggtagatttgccaatagacagcatttgcgcaggtttaaagaataaaccggcatctttggcacctggcagcattgggtaggggcctaacaccaatttagccggttttttcaggttgtcggagtatttattaatggtggagttccacatatatgtaccggcccactcaccgttaatccagggtttcatttcgtacatattacttttgccgaaggatgcatagtatttggtcgaaggcattacatggctatctaccattttcttatacagagtaaaaaactccacccattgctctttgctataggcaaattttttgttggcttcgtcaatcgttggaatattgtatttttgcgtcatataagagcgaattaacgccaatgtgtcctgatgctctaaaacgacgggataatattggttgcccagtttttctttaaatacggcgcctgcggctagcagctcgtcccaattttttggatattctagacccgcatttttccaggtttcatcgttaaaatagaaaatacgggcggtaaccgaaatcggaataccgttcagtttaccgttaaccgtagtttgctgtaattctttgggatcgaactgatccaaatccaacgtgtctttgactttaaataaatcgtagaagcctgcgccatctttagagaaaatcggcagccagttccagttggtttgcatcacatccggttcagtactaccggcaatttgcgtagttaaacgagaaagatggccgtcccaaccggtatattcggctttaacgttaatattcggatgctgcttatggaattcctccaaagcttttagcgtgacctgatggcggccattaccaccccaccaggacatacgaagattaacctcatcctgagcaaaagactggtgtgataatagtgccagagtagaagctatcagcgtgtgtaggatcgcttttttcattgggtactgctcctgttaaagagagatgtttttttctgtttttgcgtcaaagatatggcatttatccatatcaaactggaaataaacggtacggtgcagtccgttctcaataatgggacgagcttcatcagaaggcagacggcaggtcaactcgaagtcatcgactttgacgtacataaagaactcatgccccatattttctacccgcactaattcaccctgagagtgatgggtggtgaaaggcgcttgtgacatacgaataaattccggacgcacgccgaagaaaactttttctccgctgtgtgccgctacttttctttgttgggaaggatttaataccagcgtatattgacccaccgtcaggccaatttgcccctcggtttctaccagtttactcggcttaatattcatctccggcgcgccaataaaaccggcgacaaacatattgaccggatagtgatacaaattgtctggcgtatcgacctgcataatatgacccagtttcatcacgcagattctgtcacccatggtcatagcctcggtttggtcgtgtgtgacataaaccgtggtagcagctttaccgcttttctttaattgcttatgtaaatcggaaatacggatgcgcattgatgcgcgcaatttagcatcgaggttcgataacggttcatcaaataagaacacgtccggtttttttacaatggcgcgccccacggcaacgcgctgagcttgcccaccagaaagttgacgcggcagccgatccaataaatcttctaattccagaattttggctgcttcgctgacctgagtttcaatttgttcttttggtaatttgctgagcttcaggccaaaggccagattttctttcactgtcatatgtggatacagcgcgtagttctgaaacaccatggcaataccgcgagattttggtgccagattattaaccacccgatcgccaatacgcacttccccatcgctgatggtttccagaccggccaacatgcgtagagtggtggatttcgcgcagccggacggcccgacgataaccataaattcgccgtcgtggatggtcagatcgataccgtgtaccgctctgaaaccgttggaatacactttgcctaatttgttgaaaatgacttcagccatgataaatcctcttttaacctttaattccgctgctggtgacgccctgcacgaaatagcgctgagccaggaagaaaacaatgatggatggcagaatggaaatacttgccattgccaaaatctcgttccacggagcgccttccgttacatcgatagacattttcagagccagcgcaatcgggtatttatcgacgctgtagacataaatcagcgggccgataaaatcattcattgaccacataaactggaatagggcgacggagataatggccggtttaagaataggcacgactacgtaccacagcacttggaaggaattacagccgtcaatttgcgccgcttcttccatatcacgcggtacgccgcgcaagaattgaatgagcataaagacgaagaatccctgagtagcaaaagctaagggtaaatacagaggtaaataactgttcagcatgcccatttcgcgaaacattatgtattgcgggatcaacagcacggtacttggcagcaacatggtggtaatcaacgtagcgaaccagaactttttccatggaatatcgaagcgggcaaaaccgtaggcgacgatagtagaggaaataatggtcagaataactttcgggatgacgtatttgaatgtgttcagcatataatggccgaaattatattcagtaccggttttccaaccattaacaaaaccgtctttcgttgcgtgctctggccatagtcctaaagtcgtgaagatctcgttattcggtttaaatgcggcggagaacatccataataatggatacaacattaataacccgacgataattaacaccacataacggagggccgcacttattttttcttttcgcaatgtccggctgatttcttcagcggcgctttgctgtgtagctgacagattttctgattgagatcgcgggttttgttggatatcagtcattttttcctcctttatcggcggagtagaacacccaatatttcgaagatttaaaggcaatcgaagcgaataaagcaacaaccaagaataatatccaggccaatgcggcaccgtagcccatgtcgaaatatttaaatgcggtgtcataaatataaagggagaataaataagtgtagtgcgttggcccgccaccggtaataacgtaaggggcagtaaattcctggaaggcctgagtggtttgcataataaagttaaagaaaataaccggtgtaattaatggcaccgtgactttcataaacatttgccatttagaggcaccgtctatcatggcggcctcatactgagactgaggaacgttttgcaatgctgcgaggaagataaccatggcggaaccaaactgccagacgcgcagcagtgttaccgaggttaacgccaaagaaggttcgccgagccagttaaccggatcaaagccaagcacgccaataaagccgttcaataagccgtcgatggcaaatagcgcacgccacagtaccgcaatggccacactgctaccgaggattgacggaatataaaaagcggtgcgaaagaagccaatgcctcttaacttaaaatttaggacaaatgcaatgcctaaagcgaaggccagctttaatggaatcgtcaaaaatacataggcaaatgtaacgcccatggatttccaaaataaatcgtcctcagttagcatatgacgataattctctatcccattaaatacgggcggattcataaggtcatattcagtaaaactgagaaagaaagatgaaacaaaggggaatgccgtgaaaactatcaatcctattatatagggagagatataggctaaccccagcattctgttttcattcataatgcttacctattttattaaaagaaaaagctaaattgtctgactcaaaagagtcgggtaaatgaaatcgatatcgtaaattacgttattgctgccattcctttgatagtccccgtggatgtacccaccattagtcaacaataccggcacttcggctaatttattttctttggcagcaattaaggttaataacgttaaagcaataggatcatcgatgcggacatagcgatgttgtgcagactcaacaaataatccccgatggtagtgctgtttaaataatgttttccctacgcgccaggcgagattaaacaattgttgatcctggcaatgctgcgccagctctatgaatgctaaaagtaaataaggggaggctgccggtggctcaatcgctaatagggtagtgtgaaaaggtctctgttttaattcgaccaaatttaagcgtttcaaaataacgctgattaggtcgaacaactcatcgtcgttgcttaaacgccaggcgcgtaccagtggcaataaataatcaggatttaaaggacagggtttgatttcgcagccttttgaaccgtaataaccgtctctgggaagaatatagccagtcatatcctgaccgtcgatccacaaggggcgcagagtattactttttagatcataggcaaagcgatagtaatttttgagtccttcaatgacccatttttccatttctgcgtcgggatgttgacgcagaatatccaacattgccagtgggttatccactagtagcgggcgcatatcgcggaataatacattggcttctcgcgctagatagccaaattctgcgccaaactgacgcgccgcccgatcgccataccaagactgagtttggttatcatctgcggggatcggctggcgttgcaacggtgagctgaattgataggcaggtaaaccggtttcagggtgacgtgccagaacgtattgacgatataaatgttttccccaggccgcagcctgatcatcgccagtgaaggcggcatatttaaaggcggcatagatcagatcggtgccggcgttgacaaaggttaatcctttggtttcaggcaattgtggccagagcgcgggatcgacaacatcgtggcgcggatgtgcaaaaacctgtgggtctcgtattttgctgtattcaccgtggcgacctaaatccagcgttttccaatcgtcaacgtgtgcatgccaaaatccttgtatgaaattcagcgtggattcacgatcgatttctgctaaaaaatcataataaggaaggtggtgcttaagctcatgcaccaatgattttgatgctggcccttcggaactcagggtatccaagtgaaagaagtggtgcccaccccaggcaaacaggccgctggcggtatgaacgccatgctgtaagaaatagcgcgtttggatttctgctcgttgccggtactgtgggtcatgagttacctggctgagcgctgtcagggttcgcagccaattttgctggctggcaaaattcgaaataggcacccgacgaccatcagcgaattgccagcacaccggctgatgggttaccacatcgaaaccgtcggctagcagcggggtgggatgaatctggctttgaccaagagtttgcactgaatctgcatgctggcgaatcgccgtcagccactgtttgatgtctgcttcgctgcctttaatgtcgcctgcaaaatgcatcgccgtcacctcttggtggaaccaaattacagttccttataaatagaaacatcgtttcaatacattatatttggatttattggcgagtcattgagcgaatgataaaagtgtgatctaagttggaacgttgttttgatttttttaagcgatgagttttaggctgcaagtgattcaagaggtttacttttaaattaatgatatataataagaaatatacggtgttaggagtggcggtattatttcgcgcaggcgagaagctttacaataactttagtgtattgattgtaatcataatcataatcatgctttcgttgtgagacagatcgtgtccattgaatttaggcaacacaaaagcacagcgttgcgcgccgtgcctatgaagtttattcgtcagaattagcgagctaaccaaccaccatccacggcgatagtgtagccactaatataatcggaggcattggacgctaggaataccaccggccccatcaaatcactcggtaaaccccagcgagcggcagggattcgatccaaaatctctttgctacgttcttcatctttacgtaattgctgagtattgttggttgccatatacccaggggctatagcattgacgttaatattgtatttggcccattcatttgccagcaagcgggtcacgcccattacggcactttttgaggcggtataagaaggaacgcgcacgcctccctggaaagacaacattgacgctacgttgatgattttgccgccggtttcctgcttgataaattggcgggcgaccgcctgtgacataaagaacaccgttttgatatttacattcatcacatcatcccagtctttctcactgaaattgatggcgtcttcccggcgaataattccggcattattgactaagatatcgattttgccgaattcagcgaccgcttgttccagtatccccggaatacaatcaatattgctaagatcggcggtcaggctataaaaacggcggcctaatacagttattttctgaatggtttcctgaggttcaacaatattaacgccgacaatatcgcagcccgcttccgccagaccaatagccataccttggcccaaaccagtatcacagccggttaccagtgcaactttacctttcaaatcaaaggaatctaaaatcatagctgaagtctcttttcatgcggtttattgatggccgcgatagcaagatcatgaagagaaccggtatttcccagctctccaatcggtcaatattccatttggacaatttttaacgtaggtcactcaccgcgatgtggtccatatcgccaaagacctgattttcgcccaccatgccccatatgaaggtgtagcgcttagtacccacacctgagtgaatagaccagcttggcgagataacggcttgttcgttgtgaacgagcagatggcgagtttcctgcggttggcccatcatgtggaaaacggccgtttcttcatccatatcgaaatagaaatacacttccatacggcgatcgtgggtatggcacggcatggtgttccacaggttgcccggagccagtttggtcagacccattgtcagttggcaggttggcaatacgtccggcacgatatatttgttgatggtacggcggttactggtggcatcgtcacccagtgtttgcggtgcggcttctgccagcgtgatttttttgttggggtaagtggtgtgagccggtgcgctgttatagtaaaactttgccggttgagtgctatctatgctactgaactcaacgtttttcgcacctttcccgacatataaagcttcttcgttagcaatttcgtaagtctgaccgtcaaccacaatcaggcctggcccaccgatgttaatcacgcccagttcacgccgttccaggaagtagctcacgccgagctgtttccccacgtcatccccaatgctgacggtttgggtcgccggcagaactcccccgacgatgatgcggtcaatgtggctataggtcatggtgtaatcatctgcgacaaaaatcttttcaattaagaattcgcggcgcaggccagcggtatcgagttgtttggcgtggtcgctatgaatgctttgacgaacttgcatgtcagtgcctctctttcagaacagtatcttagatgggtaagcccgcaggagaaacgcagtgtgccgttgagaaagggcttctagtacgaagcttttttctttctttagccagctacgtttctggtgatgttgaggataatagttcgtgtgggatgacaattcaataaaaatggaactatgttttattatttttttgagtgatgtcatgaattttggtttttccccgcgatttacacctttggtgccagtagaatgcaaaagaattcgcgagctggccgtggtttaactgcgataggccgatttaacttcatgagggtgcaatgatgcatatgttctttatcaatgatgaaactccgtgggaagtactaggaaatgggatcaagcgaaaggtgatgacctggagcgacgaattaatgatggtttgcgttcatttcgataaaggcgcaattggtgtggcgcatcagcatgatattcatgatcaaatcgcctatgtggcggcgggaagttttgaggtagaaattgacggacaaaaacgcatcttaaaggctggagacgcctatcgggcggtaaaatatgaaatgcacggtgcggtgtctctggaagctaatagcatgctaatcgatactttttcaccgaaacgtgccgatttcctgtgacacaaaggatcgcttaggaatgctttccgaagagataaatgaagtgatggggaatgaagggggaactttcccccttaatctgccacattatcaaccagagttagcagttaaatcgggcggcgtaacgagaatatttatctgtacgatgatttaatgcgagaagcgtattgtccagaattctgccatcttcctaagcctataagcctaataaagcgttaagctgggttaagaaatgtcttcaacccgaagttcctctaacgaatccagctggatatctgccagcgcccagcgaggatcttcacgtagctctgccgcaggaatgacgatagaacgcattcgcgcagctttggtcgctatcatgccgttaaacgaatcttccaaggtcacgcattccaatgggtcaacgcccagctcagcggcggcgttcagataaacttcagggtgcggcttgctgtaaggcagatgttctgcggacatcaaacagtcaaagtatttctccaattcgaacatggctaatactttttgctgcatcaccagtggggacgctgacgcaagaccgattttcaacccctgacggcgacacaattgcagcgcgtattcaacgccgggaagtagagggcgggtttgctccaccagttcaatagagcgggcaataattcgacggcagacttccgcttcgtcggggccttgccaaggttgggttttgtaccacagcttaaccaccaaatcgatgcgtagccccagagtgttgggcaatttgtctctggacgtggtatccagccccagttcactgaatatatctaactcggcttggagccaaagcggttcggaatcaatcagtaaaccgtccatatcaaaaatagcggcttttatcggatgcagattagccatcaatcatcgctcctgtcggttggagatataagagaaacacactgtagcattgtgctgccgttacgctaaaactattgctgcgcgttgtttcgcaaaaccgcctgaaactgggtttgcagcacgcaatttgcctgtaatgataaataaattgagtttttcccataagaacatccattcgctggggattaataagctaggcttggatgacgcagatcgatgattattacggtgaaatcattgcacacctgacagaaagtacgggtaaactgtaccaataaagtgtggcactcataaggggaactcatgacgtatcaacaggctggtcaggtcgctgtggtcaaaaggattgccggctggctggtatttattccggcactactatcgacgctgatctcagtgattaattttgtctatcattacagcgaaaaaactgcgggtgtaaatgcagtaatgttggattttatccatgttatgaccgatatgatccgttttaacaccggttttttgaacatattttggtttaactcgccggtgcctagtctggatgcggggttctctggtgccaatatcatgttctttatcatctacatgctgatttttgttggtttggcactacaggcttccggcgctcggatgagtcggcaggtcaaacatattcgcgaggggattgaggatcagctgattctggagcaggcccgtggcagcgaggggcggactagagcgcaattagaagaaaaaatcgttgtgccgcgacacactattttcttgcaagtgtttaccctctacattctgccaatcattatcgctgcggtggcttattttgttattcagctactcggcgcgatggccgcgggctaactatcttgcctgaaataaacactgtgtctgaaataaacactgcgtctgaaataagcacagtgtctgaaataaaaaagcctgtatccgcgaggaacaggcttttttaacggctaatagcgatttattcagggtgtaacagttgttctaccgctttttgcgcggcaaccaaatgttgaccaccaaataggttactgcggtttaataaatagtagagctgatacagcggttgccgttcaataaaaccgcttggcagtggccaaacgctttgataaccatcataaatttgagccggaaggtcggggtagagcggtagcatggcgagatcgcattctctgtcaccccaatagcaggcgggatcaaagataacggggccattggcgctggcggcgcagttagcaggccaaagatcgccgtgtaaaagggaaggctgcggctggtggttttgtaatttcgcctgaactaaggcaatgatttcgtcaatatccccgaaaatcatgcctttctctgccgctagctgtaattgccagccaatacgttgctcggcaaaaaattgtgcccagcgccgttgccatccgttcggctggggtgtggtagacagatcgttatcgaaatcaaggccgaactgtagctgttcactccattgatgcaaatgtgccaactgctgccccagacaataggctgagtgcacatccagagatttgagtggcaaatactccagtaataggaagctgctgtcgtcgcgatcgctaccaacgccgtaaacctgcggaacacggactgttttactgcgagcgagcagggagagctgatcggcctcggcggtaaaaataggcaacatatcccgacgatcgcatttgacgaatacatctgtatgaccataactaagtcgccaagcttgatgaatatcaccgccgggcagttcggtacgctcacgcacctcggcatcgccgagttgttcgcttagtagacgattcactgcttgccacatgattcacctcctcagagctgccagttatatcattaggttaacgtctttaccgtgtaaaaaacaggagctggcgcacagggatacactcgccgaaaacctcagatcagtttcaggggtgaatctatcgagcgtcgaaaggaggaatcccgcgccgctcaagagcaacgcgggataaagtacgcgtggaacaattatagcagcttagttttaggctcaccgtcagtgctattttgtcctactttacccagaggacgggggcgtttaaccggtttaaaatggctgtatattagcgccgcaacaaagaataaagcttgaacgataacgatgcaggggccggtggctccatcaatatggaaactgatcaaggtacccaacacgcaggcgataaccgacactaacgttgccacaatcagcattttatcgaagctgcggcatagcataaatgcaatgatgcctggcgcaatcagcatggcgatcaccagaatgaccccgacggcttgcaaagaagcgacgatagtcatggctaacaggcacaacaaaccgtaatgcagcaatttaactggcaaacctattactctggcgtgattaggatcgaagcaatacagcatgaaatctttgcgtttcagcaacacgaccagcagcgttatcgacgcaatccatagggcctgtttcagttcatcctgcgtaatgcctaacatattaccgaatagtatgtggctaagatgttgatcggtatccatacgggaaaatagtacgataccaaaagcaaacatgcctgaaaaaacgatgcccatcacggtatcttctttcacccggctgttatctttcaaataaccggtggctaccgcgcaaaaaataccggaaacaaaggcgcctatggctaaaggaatgcctagccagaatgccagcacgatgccgggtaataccgcatgagaaatcgcgtctcccataagcgaccagcccttcagtaccagatagcaggacaatacggcgcacactacgccggtaacgaccgctgccagaatggcgcgctgcataaagggataggcaaaaggctcgctgagcagggtaaatagagtattcataggctatctccctgcggttttaccgtgctgttgcgctttctgtgaatgcgaaaacgcgttgccaacaggccgtgtttgggagcaaagacaaacgccaccaggaaaactaacgtttgtagcgttacaattacgccgccggttgccccatccagatagaaactgagataagccccgaaagcgctggttaacgcgccgatagcgatggcaaggattagcaagcgaccaaagcggtcagtcaggagataagcggtggcgccgggggtgacgaccatggctatcaccagaatagcgccgacagtttgtaatgccgctacggtacaggcgcttagcaaggtgaagaacagaattttcaatcgtagaggagaaatcccgatcgacatcgcatggttttcatcgaaaaacactgccagcagatctttccaaatcacgcacagaataacgaaagaaaccagaatgataatttcgacctgcaatacatcttcatcggcgataccgagaatattaccgaaaataatggattgaacgttcaccgaagttgggttgagggaaacaatcaacagcccgacggcaaagaaggtcgaaaatataaaaccaataatggcatcttcccgcagccgtgtgatgtggcgcactagcgtcatggcaagcgcggccagcataccggtaaagaatgcgccagcggcgtaaggcaggccgagagcataggctccagccacgcccggcaccaccgagtgggaaagagcgtcgcccatcagcgaccagcctttgagcatcagataggcggaaagaaaggcgcaaaccgctcccacgatggcgctgacccaaatagcctttaccatgtagttgtaattaaagggttgtaacagaatttccagcattaggttttcttctccttttgctgacgctgcgccggcgggctgtctttggtctgaccatagaatactgccggacgttcatcatcggtaatcaccgtcacggtacgcggatcgttatcatcgtgcagatcgggaccggataggttgatatggcgcaggacgccgccgaaagtgatctccagattcttttgggtgaaggtggtttcagtcggacccgcggcgagtacggtctggttgatcaaaataacgtgatcgcaaaattccggcacgctacccagattatgcgtcgatactaaaatcagatgcccttcgtcacgcagcgcccgcaatagatcgataatggcattttcggtctttacgtcgacgccggtaaaaggttcatccagcagtaaaaccgaaccttgttgtgccagcgcccgggcaaggaacacgcgtttcttttgcccgccggagagttcgccaatttgccgcgagcgcagcgcggttagtcccacgcgctcaatggctttatttacaataacccgatcctgacggttgggaattcgcaaaaaattcattttcccgtaacggcccatcattacaacgtcttccactaataccgggaaattccagtcaacttcctcggtctgcggcacgtaggcaatgatattttgtttgagtgcatgaataaccggtttcccgcttagttgaacgctgccttcagtgggtttgaccagccccataatacttttgaataaggttgatttaccgctgccgttcacgcccactaatgcgcagatagttcccccgtccagggtaaaactggcattgtggatggccgtatggccgttgttataagtcacagaaacatcatcgactatcagttcaggacgaacaaaatccgcattaatcattggccaaatccttccgcaatcgtgttcacggtggtattgatcaagtcgatataagtcggcaccgggcctgtcgcattcgacaatgagtcaacataaagcattccgccgtatttggcgtcggtttctttagcgacttgtctggcgggtttatccgaaatggtactttcgctaaacacgaccggaattttattggcgcgaacgatatcgataacccggcgaacctgctgtggagagccttgctcctcggcgttgattggccacagatacacttctttgaagccataatctttagccagatagctgaatgcaccttcactggtggccagccaacgctgacccgctgggattttgtctaaacgttcgcgtagtggggtatccagcgcgctaattttctctgcataagctttggcgttacggttataagtttccgcattagccggatcgtgtttttccagagctttacggatattatcgatataaatcagagcattggtaggagacatccatgcatgaggattaggaatgcctttataaggcccttcgcgaataggcagcggtgtaatgcctgcggtgacaacgacggatggaacgtctttcacattctcaaaaaagcggttaaaccagcgctcaagattcatcccgttccagagcactagatcggccgactgagttttgacgatatcttttggcgttggctggtaatcatgaatttcagcgcccggtttggtaatggattcgacgatagcggcgtcaccggcaacgttttgcgcaatatcctgaatgatcgtgaatgtcgttacgaccttaaacttcttttgggaggtcggattatttgtggcgaacgcggtagtactgacaaatgagaataatgccaatagcgcaaacagggtaaaacggcgtaaaaatatgttcccggtgtaagtcaaagcaggcagagaggtttttttatactgatataacattgcgatgctcccttttataaatgaaaatgattatcaatatcatttggttttaagtcaagtatcaccatacaataaagctaagtttactgatagttacgttatatcacctgattattatgtttataatcgccaaaatgtaccaaaaatatattttggcgtgatgacaagttgtatatgctacaaaacggcctaccaaagtggggaatactgtgaatccaaaactaggttgccttatggcaatattattgttggctgggtgtgctaaacagacccctccaacacagtcgaaaaatggttggttgaagcccccgcaacaggggaagttcaatccgagttccagaactgatagtggaaccgtagcttataacgaatacataaagcaggccgccagccattacggcgttgatgaaaccttgatcaaagccattattcaggttgagtccggctataaccctgaggtcgttagcacctccaatgcgatagggctgatgcagattaaagcctctaccgcggggcgcgatgcctaccgtatgaaagggcgcaacgggcaacccagttcccgcgagctgaaagacccggcggtcaatatcgatattggcaccgcctatattaatattctgcaaaaccagcagttggtcggcatcagcgatccgcagacattacgttatgccaccattgtttcttacgctaacggtgcaggcgcgatgctgagaaccttctcctcagacaaaaagctggcgctcaataaaataaaccgcctcagcccaaacgaattctatcaacatattcaaactaagcacccagcaccgcaggccccgcgttatttatggaaggtggacacggcttaccgagcgatgacggaataacagattaaatcgctaaccgatgcatcttgcaggcagtatttcatcggttagcgtttatcttcattggtcaaatgtttctgtctcatcccgcgccttaatttctgatatttacactcctttgcactttatcccttattgcattcattaatttattgctaatgcgtcacgttatcatttagtgttttcctcactgaaataataaatttgctgtgttttgccaaggagccataacgtgcgattaacgctttccctgacggcactggtatgtgcctcgctgttttctacttcatccctggcaacaacttatccggtgacgattactgatactgatgggcagaggctcactttcaagcaagagcctaagcgtattgtgatgcaagacggaagggacattctgacattggctttgctggatcgcagcgatccttttgagcggctggtggcctggaataatttgctgagaaaaagcgatggcacgacctggaatctgcttagtagcaaatggcctaaggccgaaaaaataatggatatgggatttagcgataaaggcgaagttaatctggaggccgttattgcgaaaaaaccagacttaatggtggctcagcttcgttctaagagtttattaattaaccttggggtgttagataaactcaaacagctaaacatccctgtgctttttattgataccaacctcaagccactggaaaatacacctaaaagtatcacgctgttaggtgaagttattaatcgcgaagctgaggctcagcagtatactgatttctatcaacagcattaccaaaacattatcaacaaaactcgcagcgttgagccaaaacccttggtgtttgtggaagctaaggcgggtttgggcggggtcgaatcatgctgctttactcacggacatgtaggctggggagcgctgattgaagctgtcggggcacataatatcggttcagatttattaccgggagccacaggggatgtctcgctagaaaaggtcatcgcgctgaaacctgcggcctatattgtctccggttcgcagtgggcaagtaagaataatgcggcagtacctttcggctatggggtgacacaaaatcaggtagatgttgcctttaccaaattaaaacagcgtcctgcttttgcgcaaatttcggcggttaaagaaaatcggctatacggggtttatcacaatttttacaatcacccttataacattgtagggatggagtatctggcgaaatttatctatccggtacaatttacccagctgcagccacaggatacttataacgaaattattgccaaatttactcaaattccgacagaacctgctattttgggggcgcaggcttcggcggtgaagccttaataaaataaacacatttttaaaaatagcccctgattggactgcgccttactaggttgggcactcaatttaggggctttgacgttttacatagccggatggaaagttgaagcaatttccagcacaccattaataatgaattgcacgcccatgcaaactaataagaatcccatcaagcgggaaatagcctcgatgccgcttttccctacccaacgcataatggcacctgagctcaacaagcatccccacaggataagggatacgacgaggaaggttaataccggagccacggccaatacccaaggagtaaaatcggtatggtctttcatcgtcgcggcggaactgatgatcatggcgatagtacctggcccggcggtactaggcatagccagtgggacaaaggcgatgttaacggagttacgcttctttaaatcctgtgatttggcttccaattgggtatcttcggtcgattgctgagggaacagcatacggaaaccaataaatgctacgattaatccaccggcaattcgcaatccgggtatagaaataccgaaggtgctcatcacgacctgaccggcatagaacgaaatagtcataataaagaagacgtatatcgaggccattctagactgattattccgttcctctgtggtcatattgcccgatagtcccaagagcaaggctacagtagtcaatgggttagctaagggaagcagcaacactaaccctaaaccaatggccttaaataactcaaaaatacttaacatcaatcaaactccacaaacttagtcatatccctgaaaaccaaattgggcattaccttgctattttgtctcaaataagacaaaaaatgcataagaaacccatcttgcattgatgtgctctatgagtaaaggcgcataaagaagatagggggagaagatcggtgtttggtgttgtgtgatccggatcatagctcgacagtccggtagttggttcaccgccaaaaatatcgaataatcataagattgtatcaatttcggggaagggtacttttgtgtgtatttgtgatatcagcgtcgaagatgaatatgttcgccagccactctcagcctcggcagcttgggttttggatcgccaggctgctcgttcccgtgggcgtttgcgtttcctgaaaccgaaaagagagcctcgtcctcgttggcgtctggctccattaaaagacacttatgaaatccgtttttatcctcagcgattacctgaactgtggttcttcagtgctgaaagtgcgttgcgtaaacgcttataatatatagaaatgtacgtttggacatttcaattgtctgacccaatgctccaatcaacccccaaaatgccgcctcttatggtggcgttttttacgtaattgaataaataacctttactgacgatttttctgagaaaagaaagcgctattttgccagatcctaaacggttgattgacacccgcgcctgttgaatataatttcaaatatcgagaataataattcagttggtatttgtgatgtctaacccattaacaccggtagaaaaccagttttatgcttataacgctcacgatttagctgcattttcagccaactttagtgaggattttattgcctaccgtatgccgtctttagaaccatcaattgttggtaaaatgcagctggaggccttctatcgtacccagcgttttaatcaggccgagttaagagcagagttaatttcgcggtcggttttggggaataaagtttttgattatgaaagaatctatggtttaagcgcagagccaatcgaaagcgtagctatcttcgaggtggttgaaagtttgattgtaacagcttggtttttctataaatagaatgatgaagcaatctcgccgttgatatctgcgtttcaataaaccgtagatatcacggcgtttaatgttatagttaaatggctattagttaaatacctattagttaaatgcatagataactacgattttttccctgaataaggtctaagtaactcatccaatatttccattctttcacccacagggatgtagataaaacgacaaaaccaaccttttatttccttattttttacttgtgtccgtaagaaatatcggtgaaatacttttaggtcatcttcaatgttactcatgatttattccttttactaagatattcatttaatactaaacaataaaatagggaataaacactgatgatattggttatttttgttcatgttttctaaataattgaaatacatgcatttaatttgtttctttaaaggcgtggtgcaggaggttcatttcttctgaaaacatcacacctggtattctggatgaaaatcaaaagcacgccattatctgataaccaatggcatataagcatcctattataattaaggtgaggccaatagctaaatacgataaaggaatgcaaattcccgatagttcactccataaacgtttaaacattttcacttccttgtgtaatcagaataatgatgacaaataaataaataagataaaaatcggttcttcagatcaataggccatgattgatcggtgaaagctattgtttatctcgcgtacacttaatttgttgtgataaatttagatgaataagtgaatggtaacgtttggtgatgcccttgagcgacattcaataataagtatctattaaatttaatgtttattaatgggattgaaataaatttattttccagcatcggtttaaatgagcgtgctaattttactttttatcagattgattatttgcatatagcatacttcgccatgattaggcgtgctaaaagctgtttcgttatgatatgggtaaaggtggttaggataagcgtttagtaatttgctgatagatagagcggttgcattggggaagggcgatagataagtgaatgatttggtgacaagcgacatgggtcatcaaaacgaacataccgataagtgatgagctgataaaaagcctagacgctataatattaaaacgcctcggctgcataaacagtcgaggcggcgttccagtaaccattgctacacggaaacggaaacccattatgagcagctttttctggaatagcaatatggatgatgggaagcttaagtgattaaattgcaaattttcttatatcgaagccctcccaaagagggcttgatggggtgatgaacctaggcgattaactatgatcagaaaggaggccagtagtgggtctgctcatgccagcctcttttatacatacaggcatcaataacggcattgcgagctgatgcattacgatctttctgaaccgttttaaattcaggttctttctcgtagcgatatcccttgtcacagccatctttacccttttcacaggatttgtatttatcctgataagagaattcaaaatcagtcacgatatcgggactgtgtctctcgtagccaatagccttacattccgcagaatctctttcgcggtctaactgtgtagcaccacctttttcccattgggtacaaccagaaagagcaaggatcaaaagaacaaaaagtgagttaaaatttttcatcattatgtcagcaaaagttttcggaagaatacgcgaagaatccgtttcacggttctcattcacgagtaaggaacggagagtaataaataaggcatcagtaatgcaaatgacaattgagtacgtttatcaatcgttgagttattgatgattatctgaacgattgatttaagtcgaggaaatctgtctgtcatcaccacaaaattgaatttttttgtacgtaattcaggctgattccacttcttatgataataatcgcagcctgtgtctttataaatgagactcaaattggcatcattgcgttagaaatcactttttaggatggatagttatgaagcagtttcctttcgaccaacgttatgaaatcgaaaatgcgagcggtgaacgtgaatatttcatcgaaggtgatgtatatattcgtttactagaaggatctccagtttaccgtattgatggctatgaagtttatactcatggcgataatggtgaattagtcggttttctggaaggtgaacgtattacccgtttggatggcgaagaactgttagttattttaactcaataacgctatcgccttcgactcgcttcgtatttgaaaactattggactcgcatcagataagaaatcgccacctgtatttcagagcgtaaatataggcggcgattgatagctacaggaagatgaaatgcgttagaaacggtaatttaacatagtcactaacacatcatcggtgctgatacggttagcacgagtaaattcattttctttcaacaagttaagtttgtattcaacgatcacagccatattcttgttcagatcataagttgcggcaagatcgataaacttcaccatatttttgttgtcgccaaattcgctttcgagatttttgccgcgtccctgcaaataggcgatcgatggacgtaaaccccagtcaaattgatattgcgcgacaaactctatggcctgagtctggttggcaaagccatcttttctaccgacatagtgcatatttcgcacatccgcgtacatggcggccagataaatattgttggcgtcatatttcacacctgcattccaaccgtcggcttttttaccgcgatgatccaactgttgctcatcggtacgtttcgatgcggcataagatgcgccgaaactgagaccattatccagcgtgtacactgcggataatcccataccatcgccgttttggttagctacgctacgcgggttattggtacgtggacctgtttgatcttcagtattattccaaccgtcgtttttgccttggacctgaagtccgatatctagtccatctaccaaattgaatagattgcggttacggtacgttcccacattgttggtacgataggtcataaagttatcggtattatcgtaactctgtccaccaaatacaggaataaccgcgccggtccatccattaatatcgtttaatattccgtaattacgaccgtaatcaaaagatccatattcaccgaagctcaatccggcaaaagcaatacgggtagtatctttcttagtgcccgcactttctgcctgattcattttgacgttatattcccatcgggcatagccagatagggtatcgttaattttggtgtcgccggttaaggtaaatttaactttagactggtcgccagcaaaacccttatcatcggagaaataatggcgaaccttaaaagaaccggaaagtgcaatacggttgccatctttattgtagagctctgccgcaccagcgggttgcaccatacatgccaaaggtactattactgcaaataatttcaaattgaataattgcgatttcatcttcttccctggtttttgttatacaaaattatttccgcagtaaattaaccaagcgtgatatatttttatgcgatgacgctcacagttatccttatgcaacaaatatgtacaccacaaaaatttgaagctgctcgcgttttaatctcactgactgaagataatagaactggtaagggatgaattaattcttaaaacaacggtaaggcagctaagatgaaaaacagaacaaaggcgctgagtgcattagcattaattttcagcagctattttagtattcagcacgcaatatcggcaccgtcgaccgatattttccccggggcaacgctgacccaattacagtcgcaataccctattcattgggtctctgtagagcaaatttctgcgagtttgaaagggaaagagccaattagtgtaggttttgatattgatgacactttgctctattccagcccggcgtttttctacgggaaaatgatttactcacctgatagttttgattttttaaagaatcctaaattttgggacgaagtcagtaacggatgggacaaattctctgtgccaaaaatttcaggcgcagccttgctaaacatgcacttatcgcgaggtgaccgggtgtactttatcaccggtcgaccaatgccatcttccgggaaggaaacggtgacaaaaatcttacaacaggattttaatattcctgatgaacagttaaataaagtgatatttgccgggattggcgatggagccaaagtgagccatatgaaggaaaaaaatatctcgatattctatggagattccgataatgatattgctgatgctagagctgcaggagcagaaggtattagagtgttacggccattaaattctaccaataaacctatgcctaagaatggtgattttggtgagaaggttgtcattaattctgattattagttcacgctaatattggatcgggattgacagcgactcaaggtaagtcccgtacttactgacattgtgagtgtagcaatggactgtattatgcccgttagaggcaaaacattatctttatttattatgactaatacaccagaagaaattgaacgacctattttacaactctttcagaagtatccacagaacaaatatagcgtgcaggatgtaatgaggagcctacaggaaattagccgctataaaatagaatatcggttgaaaaaactcgcaaatagaaggctgataacctgccacaaacgcaaggtgggaatcgtcattcgttactattggcaactaaacgagcgtaaggaataagctcagtggcgagtgattacgtagtaaaaatagcgattgactttgatttatcggtttgttgtttctcattttcgcagagaaaaaacgtcgcacaaacatatatgtttttagctacgtaacaaccggggcacatggttaggtataaaaatacaaacagtggaagggcgggcacttccactggcaatcattctaggctaggcaatctttcgacaaaggtatttatctttgatcacgccatcaaagaaacgccctttagacaccacagacataaaatcgttataaacccgtattggcacgttaacatactgataaatgtcattaccacagaactgtatttccaatacatgactctctgggtcatacccaattgagtgaattctcgaagatgaaaccgactgtcgctgcaagaaatagtcctcctaggtgaggtaaacgtccctgaaaaaaatacatcgtgtcttaagtgtgtgcgtcctaagtacatcatactcgctgaatcgatatgagtcataaatacatttgtgaatgtataactcattgtggctaaagctattgtatgggcttatgaattaaaaaggtaagtactttaatgcccgtggctttgacagagcgcaaccacaggaaggttgttttagtatataaccgcaaaattccagctcgacggcacttggcagctgcaaagcatcactgatatcttgggtatggtttattgaatatgcagattggtcgcgggttttgggttaaacgagggaatatatgtacaacgacaatgaaaagaaattttacgttattttaaaccgcaattgcgagactccgactctgtttaacgcggcttgccatttaaccgcaggaataacagatttgatcgaagaacgtgaatttcattcttatcccagcactatagagggaatcagcgcaaatatgagccactatcctatggtggtattacaggcaaaaaacagtagccaactgagcaacttaattttgaaatgccaggagcaaggtgttttgtataatttcttcaccacgacgatgctttcgcattcagcggaacagcaaatttctgatacggcaaacacagactttgaaaaattggattttgtcgctgtagctttatacggggatgcagagatgttgaaacccttaaccaagaaattttctgtctatcgttagttgaaagcgcagggggattatttaggaagaaatactcccccttggctgcttttggcccgcttttcagtcggcgaattgtcatttaggtaaccgctaaaacccaaggtaaactaccggctctgttgtttgaaatatcgccgaatacttaactattcttcagtattcaaggatttcagctctttactgagagaaatcgaaagtacgattcgaatcacgacaatagaagctagaatgattaattctttgtaatcgggttcaatgatcgtcttcaaaatgtctgccgggattaatatttccagtgccagcaacagataaccacccaaatccagtcgaatacgttgaatatttgattcgccgcgctgcagttcgttttttataaatgcgaataggcatttaaccacgccataaatcaaaactaaaacgctaacaatatttagcccactggctgccaacatgatgaaagtatgaatgttcattattgggttactccctgaatagtaggccgttttcccttgtcaccgcgggcgcgggaagcgtcttcagtatagccctaaatactggccgtgggtgttctcacatccagtcggctgcaatgtagattttagtggtgcagaatttgtcagatttaaaataaataagcgacgaaggtaaagcagcggtgaaggttgaaaatgcttcaccgctgagccataaacaaggctatttaatcatgattatcttagttgtgagaatctcgtagcgcttcaatcgctcgttccaaagagtcaatatcattgcctgatagcaacggtatgattttgttaatttcctgctctggcaggtcataaatttgcagtgctaaaaggcggcgaataatatcctcagaaaagcgggtctttattgcgctagctggatttcctccaacgattgtataaggggcgacatcgcgggtgactatgctgcctgaggcaataatggcactttcaccgacggtaactccgggcatgatcatagctctcatcccaatccagcagccatcgctcaatattgtgtcacctcgatgctgataagattcgctgatagattccataaagggatagaagctgaaccaatcaatgcggtgagtatggtttccacccattaaaataacggcttccgcgcctatacatacataattgccaatgatcagttggtcaatctttccgagaggttcccactgttggctaatggcatcaccgtgcagatagcgaacaaccgatttttcaaaaccttcatcccagcaatggctgtaatagctgtgcgtacctttgatgatgatattaggatttttcaccgtttggtgaagtagctctgttttcgaccaatgtttatcttgcatggtctcattcctttttcaaaaacatccgagccacgaacgtaagttagtggcagtgattacacgttcaaatcatcaccgccggttaagcaattcgaggttgtaacagtagggggatatttatcatattcaatgcctcttttaaccctgaaatgctattgctcattgccaaacaaatcaatgattcagaaccggagatttagcctttatttggctttagtgtgaatcttcctacgtcaaaatagggaattaaatgcatttaatcttaacccgctatcacaaaaacgcatgtggggcagagcgtttgagaaactaaagggcagggatatcaacattcccacttctgcgggtggataatcacatattgtgagtgttactatgttttgtcagttattgcgtcacaccatagatacaaaacgagttgtgtacatatgagtgtatatatcaggcaaggtaaagtcggatagcgcacataacaaattgaatttaaactaaattatactgttacatgtgatctgtcgtgtaagcaatccacctcattcccactcgttcatctccgtttaagtcctcgcagaaagccactaaccatcaagattctcggcactatacccgttcatgactgtttcactttgttctattccgtgcgttaatatttgtgtaccaaattgcgtaccaaatttgccggagtaatgtcgtggcgctgaatgacacgaagctaagaaaaatagtcggaaaaccctacgatggcccgactgaacttcctgacgcgaatggattatctgtccgggttagccctaaggggctagtttcgtttcagtaccgctatcgctttgctgggaaattacagcgcatgaagatcggcacctatggaactatgtcgctaaaagaagcgagggatgctgttgaagtgtgccgccagcacctcagtgaggggagagagccgtcggttcagcgcaagatggcaatgagcgaaaaaattcaggccccgagtgttagtgactgcataagcgagtggttagaaagtccccaggctaaaaagctggttaagtatgattactggataaggatgtttgacctgcatgtcacgccatatgttggaagaatgacggtcgatgagatgcagatagcacactgggaatcagtctttaagcgaatgagggaaaatggcgcaccggtgatggctggcatgatgctggtcaagatgaaacagatttttaactattcgttacggcgtaaccgaatcatccggaacgtcctgactccattgtcagtcgccgatgttggcgatccaatccgaactattgaccgattccttaacgataaggagataggactattctggcttgctgtcgattcatccaagctcgcataccagaataagctatttataaaattagttttgcttactggctgtcgcggtatagagctgcgcatggctaaaaagcaggattttgatttggatagaaagacgtgggcaatacgggaggagttatctaaaacccggcgccggttcgtgagggggctttctgacgccgcagtgaccatgctaagagaagcgtttgatatttatcctaagctgggccaggtattcccgccggcaacgattcagaccgacaggccgatgtccgcaggggttcttttatcgatggccgatcaggtaggcagggtgatgggcgtgactgattgggcaatgcatgatctgcgcagaaccgtaaagacaaaaatggcagaactcggcattgcaccgcatgtatcagaaaagatacttgggcataaaatggcgggtatgctcgcggtatatgaccaccatgattacatacgcgagcagatagaggcggcagatttgtgggcgtctaagattcaaacgtgtgtcgatgaaatcagccccatgtcctgacagaatttaatcacgtcctggtatcggaatagtgcgccacctttaggggctgacaactcctttacctcgggtgggaatggcgtattttgttgtttccattctttgcggcgatggtaaaaggtcgttctcgatatcccgccgagcatttgctggatagccgttctgtttatcagaacaggaggaacatcgatttttatatcattcattgttggcctcttatttctttgtcgatctgcctgacgaaatagctcaaccaccgcttagccgaaaacgagttaggcggtagggcggttattttttttgcgtagcgatcgaggattttcgtaacgatggggtcgtgctgagttttaggtataccggcggtggaattaatgatttctgttctgcactgccgggcaaccgatctgatggcattttcgattgttgcttccaaacattcactccttccagcagaacagccaccagtaggcgatgatgccgccgataaagagcagcacccaatcaaggtgaattattagttcgctcatattccttcagctctccccggtatcagttgaatagacttaccgcactcattgccccaagtatcccacccgtgcaactccttccttgaaaataactcgatgcgcttcacatccccataaagcatttccagccggtttcgaacttcccacggcttttcgctgtggtgaccaagcggcgagtaaactacttgcttaatactggcgttcagccgctccagcccccgcccgcgcacggcgattaacacatcttccgtgttggctctcgtgtagttaccgccattcatccgtgactggtcattcagtagggtgaggaaatcgtaaaaatcctgcacctcaccggcggccagagccttgttaatgtgctcttcggccagttggtttagctttacccaggtgaaccccttcatcgtgcgcacctggaaaccccaggattcggcgacttcctgagcctcttggttgaaatttcccgtgtaccacatggctagcacagcatccggtgctgacatcgaccagacaggcaagcgtttcagctctgctaacgtcatcgttccatagtgattatttgccgccccgttgctggccttgttgctgtactgccacggcgggtcgcaatagataagctggtagtcactcatgccgcctctcttaacgctttcagatgcggcgcattagcctggaaaactgcctcggcgaaaccacgaggtgtagcgcttcgcaaattagccctattctcactcggagccattttatgaatacggtcatctggaacccctacaccaaccgccttgaattcatttggcatgacaaatcccccaccagtccataggcatgttttctttgtataattgtcatcaggctcgtaaccagtaaattgatgagggtgaaagaagaaatcaggttttcgccagaaagagcttatttggcttactgggttttcaatcatgtatggaacacgaagcatttcgctaatgacatgacactgccaaacaacttgcattgctttaaactgaaatgctgggtcaatcgttctttttgaatcaaaccatctcgcaccgcttacagctaaatcagtgcacggtggaaatgcggctacaaataccgggttatgtattgagcgcaataaatcccatacgatcggggtatcaattacattcccaactcgggttattgatttggaagtgctaatcccgctggggtgctgtgggtcaattaagattgcatcatacccagctgctatccacggggaagccataatcccggttaggtcgcacaggcaaataatcacgcctttattcatgccgcattccttttccgccgttcgtcaatctcatggtcatcccggcagtcagcatcacagaacaacccgcgagtaattgcccggcggcactcataaaagtggcagcgcccggtgaatgtcatttttggctttggccggttggctattgcggtgtcgatgttgtgctgttcgagagctgaagcgttatcgatatcgtcgggcattaggccacctctgcaatttggtatgggatcatgctaatcagcacgtatcccggctttatatcgccgatgtcggcaacgtgtgttatttggcgattaacgaagcttccggtgtagttaccggcgtcgaattcacgcagcgttagcgtgtcacccacctggtaattacggtcattgagccttatctcggcagtcttaattccctggtatacaggcgcaaagaattccggtctgattttcagtccgtgagttttcataggggatactccagatttggtgaaatccgtttccgtgagtccgtaatttatggggtattaattggatgttttaatttgggtgttaattgaatggatgtgttctaaaaccgcattatctacctggtcgtctgttactaaaggtgaccacctagctatgtaatattcctccgatcctatgctgtattcttctacaggcataaattgatgtttaactttttcatcttttctcgtgtggttaactccgatcagaacagttcctctaggcgctgtaatgatatcggttttgccatctggttttattattacgactttacattaggcatatatcctcctttgtcaggagaattatagacccgctatcggcgtacttcgccacagatcagcactaccgccgggcggcgttctttaatcagtgcggacacgttctggcattctgtctgggtagggtagatgttttctgaaactggcagcgcttcgcaggcgtcaaggccgcaggaactgacaagtaggacaaagccgattagcatatttcctcaccttctaaccgtgtattcaatgccacgcaaggctagcgccgccatggttttttcgagtgatatcatggggccatagtcatcataattcgctggcgctggaagtgttactgaatctgctggcttggccgctgtgaataacaaggtacctaccggcgcgtcattaatccaaccgagggttttattgccgttacagctaatgacttggcctataggtttctgctgtttcagctctgcaagttgctcacgcagtgatagcagttcttctaatgcctccgcatcattgagtgccacctgactatgttcaactgacgaccatttcatttcgctagctatttttcgaatttctgcaattcgtttttccagctgttctttactcagcatctgcattcccctctaccgtgaaaccggctgcctctatcgcatcaaatgtttttgaccaactgataacattacatcttgatgattttaaatatattttctttggcaatacaaccggcttgcttagcttctcgtttgccgctgataacgctgcttcacttgcaatcaattcgatgcgaaacttctcgctcacgatgtagtgaagattgcgatcacgctgagccgcttccagctgggctatcagtgcgtctaaatctggcattggtacggttaactggtcagatccgtatgacttggctatttcaaacttacttttaaggcgagcaattctcaattcttcgatattcctatccatcatgcctcctgcttgcgacgtgagcctttgtattcaggctttggctcatgctgtggtttgcagattgtgtgttttaaaatctcaatccaattttttctagaattaatcacccatcccccgccttcagtatcgaaaaaattttcatccacagggacggcaagacgctccagcaattcacacggaacggcaatagtgtcgcatcctgagttgtaatatctgatttaagataaaatcttgtcctcttcataacgcccagcagactctattttccctctatatccagcgttgttttccgcccacaaaagtatgtagcggctatggcgcatagtgtgatttacgctgatgacaaaatattccttcgccatatcagtcacctcaaaacgaatcgataatcagataagcaatacccgcacaacagatagcgagtatcaccgacaatattaaaagccactcggatggagtgactcggtattggagtgccttgttaatggcttctcgaatttttgacacaactattcctcagcagacygrctgccggttaagtggaggggtaagggatttaagccaccagtccgttagcagcgactgatagcttcaagcatgagttgaaccgctccgcaatcaattgcgctttaaatgggttccgttcaatgcggttcttcggggtaatccatccatgatgtattcgggrataaggtagcgtcaccgcgcctaccgtgatgtttccatgcggattatccatatatctgttaccccacggattcttccatctcagcttttctgatgctgtaaatgtcgatcgccttttccagctggtcggggtggctagcgaggacacgctggctgtatttgaagaatttctccagatctgcaactgactttgcgttgctggctgcgttggtgaagtcagcaagcagggcatcaggtgagcgctcatctacttttgtcgtctccagttcgccctcgattggctccgctttcttggtgttgatcatcttgttcaggtcggcattggtgcgcggggttacatctcgctcaggctttggttttccgtccaattcatcagtggagtaaacgccgagaataacctcggggcagtagaggcgagaccagcgcttaacggctagataggccaattgttgcttagggtcgcttgcccacagggtggagtttctcacctgagcctgagacagaagaagctcaagaacgcgcggttcatcctcccccttcatcgtcgcccacactcgaatccctaagcctttctcgtctgccagagtccagtctggtgctatgtatttattgccgttctttgaaactttttctgcgaacttgccgatcacgttttcccatgggccaaaccattcataatgaatccggtcttttgtaggtgccattgcgtaaattaccgcgttgaccagttgcgcctcataccccagcgttccgctgacgacgtgggttttctgggcaacaacaaacgggttcataccccattgaacggcttgcattgcaacagccatgcaatcagctttgttaccggcaagatgcgatgggattgttgaccggccacttgccattagcgttgcaaaattttggatggccatcagattttgagggctaaaaatagccacgttcgcattggtgatagctggctcattgctgagttcgatgttggcgatgtcagtcattgttctttttccttgcccatgccgggcggtaaatggtttctacaccgccccattcgttggtgagtcggcattcgtgataggtttgcaggttctttctgtaaaggtcatgcccagcggctacatcgtcagcatcgagctgaaatacgcgggtggggtatcgaccacagttaatggtttcgcttactgcgataaacagaaatgtcgggtattcgttgaagtgattgagatagccgtcccggtacatagcgtcctgcacgtgataccggaactcttcgatgtgtcgcgagaagcgatccatgtcagccacttttttcacatccactatgattggctgactggtgagaaacttgtccggtcggatccggcatagttctgatgtttcttcatccgtccaatagattgaagattcgcagtatccttctgcttctaaaaagtatctggccgccgggtgggccattgcactcccttgcatcagttccagcttccggtgctgttcaaagtccattacggtcttccctgactcttcgcactctttcagaaagtccttttctgctgccttaccatccgttgtgcgccggttaaactctggcgctttgatgaatcgcttatcgaactcatcaggttcaagtagcaggcagtggagtgctgtccccatatccagcgcctttagcttttccgtatctacaggcgctgttttcttccatgtaagtattgcggggttaatagccacatcatccagttgcgacttacttacccccggacccgagtgataatcctcgtttgatatatcttgatagtggcccggttccatcatgccgcctcatcatgctcagccagtcgccgctgtattcccagcgcctgttgccatttggcattctcaaataggacgttgtagagtgcggtgtcgagcccctcgaagtcgtactcatcaactaaaatattgaaagcttcacggtcgaattcagggaggtgttcaaaggttttaattaggttatgaacccgcagtgccttttcctgcctctctgcgacttgtccagcttgttctaaatcttgctcgttcaatgagctataaagcttccttgcttcggtaatgtcggtaggtgtcatagcggattacctttctgttgaaatatgctgagaaaccagcggatccacggattggtgttttttacttttggctgatgttggcaatagcgacccatgacggcatcgccagttagtacgaattggtacatgagtggctcctgaaatttaagtttgattagtaagtgatacgaactgaggaaatgaggttcttagcgatagcggctacacatttctgtgcgcaatcttctggcaatccgtttgcaattaagtcggctactgcttggcggttgatggtgcgacggtgttcaacgtcagccgcgcgcttggctgcttcatcagcaacacgtttctcttcagctaaccgggcatcttctttctgcttggcttcacgttgaactcgctcagcttcctgctgtgctttaagtttctcggctgcgatagcttcctgcttctcgcgctcgacgcgttcagctaattccttggcatcacgctcagctttggctgcggcatccttggcggcctgttctgctcgttcctgagctagttttgcatcacgttcacgttgttccgctgcttcaatgtcacgcttggctttctcttcagcttcacgcttcgatttctctgctgcctgttgagcaatgaattcttcatgtgctttccgcaggcgctcaacttcatcagctttcgctttggcgtcacggtcgaaagcgtcattcatcagcagggccatctcatggtcagactctttcttggctgcccgttctgctgtaatgctggcgtccatttcatgggcttcctgccacatggccgagtaagcttcttcggctgcgacacgttcctgttcggcctcccaatcagtaaccggctttcggattgctactgcaatattatccagttcgtcacgaaacttttttctgttggcatctatcagagcaggccgtgcttttagctcagcaactaactctttggcgcgaacctcaaatgctgctttagatttacgcactttgtcagccatcgtgtataaacgccgcgaccctttgccgtattcaggtcgccaaccactgaaccggctgtcttgcgaacgttatcaatcagctcatcaatgaatttgtcattcagtaacgcaacttccaaatctactttttcagctggcaaggtgacgagcgccagttcctttttttcatcactcatgctcatttccttataagtttgcttcgtaaaaagacttaatggcggattcgaactttttgaagtcaaatgacccagcgtcaccagccgaatcggattcaatccaaattattccgtctgcataatttgatattgtgaagtcgccgattttcaccgctttggactttccgctatcaactgaggggtttgtgtctgtgttggtaaataaaatacccatgctcatttccttgtgtttagcccacagcaaaacaccgacgatgatgtcagttatttactctggggattggtggggggggttattctggtatagattcagggactgttggcttttcaaactctccccatgctagcagaacacgctcaggtagtttgtcagtccaattgctagttgtttggtatttgccatcagcgcctaacttgaactcttcgaaatacattcgaccttcatctgggtactgagcgtagtagccagtgaatccaataaactcgccatcttcgttagtccagtcatctaagccgctaggggtgccaggtggaaaatcaccattctcttcaaaagaaagcagttcttcatgggttgcttcggcgttcaaataattcaactcaactactcggcgattaacctcttttaatgttgctattcgctctgcttttccatctataccaaggccgccatatttaatttcatactggtagatatcaacaacggcccatatttttatatcgcctccacgctttacaactggaagttcagatggatttttccaaattacctctttcatatctcacctatttagttggaggggttattccgcttctacaaactcgccattctcattcagcgaataccaaacatccggcttaattccgttctcgcctactttactggcacggatatgaattagttcgccttcgccatttcggtagcacaggacgattgcgccgctttctgacgctttagcctttccaccatcaccgaatgaagccgctacagattgcgatccagacacctctgccgctgaccagtcgccagtgttggttgccgctgaccggttgccagtgttggttgccgctgactggtagccagtgttggttgccgctgaccggtagccagtgttggttgccgctgaccagttgccagtgttggttgccgctgactggtagccagtgttggttgccgctgaccagttgccagtgttggttgccgctgaccggtagccagtgttggttgccgctgaccggtcgccagtgttggttgccgctgactggtagccagtgttggttgccgctgaccggtagccagtgttggttgccgctgaccagtagccagtgttgattgccgctgactggttgccagtgttggttgccgctgaccggtcgccagtgttggttgccgctgactggtagccagtgttggttgccgctgaccagtcgccagtgttggttgccgctgactggtagccagtgttggttgccgctgaccagttgccagtgttggttgccgctgactggtttccggtcatgatctgctgttcaagcgacttatcaactttgctccagatccaatcaatcccgcgctgaataaactgagggagggttagttcttctgtgatggttatgctggcgcttgcgatttttgtatcgccatcatcttcgcggtcaataacaccaaatgattcagttactgcataccggctatttgttggcgggtaatatccgaaaacatcaaatgggcattcacaagcgtggaagccagagccgcatgcctcgaccttgccctcatgcgtatacgttttgccaatttcgaactggtagccacggcactgaagattttggtcgaagcctttaaaggtaataactgtttctttgctcatgctgcttccttgaatttttggaataaaaaagccgcattaagcagctcgttgtttgtttcagtggtcttattgctgccaccggttaagtggcaggggtaagatcactggggttccgagatgaaatctaatacttcctgtaaatcaccgtcacacagagctacatatccatccgcatgcattcgctgaagccattcaatgcttatgtttcgatattgactcatcattcattcctcatttaccagccaataaaaaaggccgcgttatgcagccttgaatcctgtaacctcaatccgacatatcggataggtataaagcttgttgtcctgaacaatcttctgcgcagcttccatgctgtcagcgctgtcacagaacttaatgttctcgtaatacgcgccgtcgtcgttatccggcttgccagccagaacagtgaaagaaagtgtcattctcttaccccttaactatgtggtgggcttctttgcggttggtgcgatgaccaataaatagttgcctgaactatctttaaccacgtcaggcggcggtggttctgctatacccctacagcaagaaatcgaataaactgtaatcacccctacagttagagaattattcaaatggacgttttttctagtttgactgcagcaaagcaagcttttgatttattgaagataataaaagaaagtcgtgatgaattagttatcaggaaagcagcaggtgatctttcagaaaaaattactgagttacagatgcttaatgcggaactctctggcctttatcaggctgagcgatacatcacaggacagcttcgcgaagaaaataacaaaatcgagatgtttattgtgcaggccgagaactacgaacttcacaaaacggaaggtggatctgtcgtgtacagatctaagtcttcttccgatgacgttattgagcctcatgacctttgtgcacactgcttcggcgatcaccagatatctatacttcagcctagcattcaaacagttaagtccaataatttctttgttcatcagtgcccccgatgccaaaatgaataccgcatgaataaagtaccaccgctccctgatgtacatatcccacacagcatgaagcgctactaaaatcactaccgcgccgtaacgctctcactcttacggaagcctgctgcaaacttagccacttcaggcaaacatatattgtccgcgcttggctgctcggcgctgcgaaccggtacaggaatcgttgctttgtatacccgagctgtgcagcctgtgagggctgtagcgatgttcttttctaaccgaccctctgctgcacatttagctctgtaacgagctgtgcgtcgctctctcgaattcatgattacctccggtgattggctttggtggtgccggtagttaccggatttccttgatgcttctaacagctatcgatttggcatcacgttcgcattgcgatccggtttgcttattcacaaggccgttgtcttaccagcaccgccaaagccaacttctctttggtgccctcgtatcagggcaatctaattgttaaagagcgtgcttcctgtcgtaccacttcggcgtcctgccgtgttgatgggataaataatcacagattgtgttttgatcgtcaacacgaattgtgtttaattggggcgcttaagtgtgatgttattgatttttaatgtaatttaatttgaaaataattcagacgtgacccttcgcacctggatatcaggcgtgaaaagtgtgaggtgagtagtgtttaaagcgggcagggtggtgagattgtcagattacaggcgcaaaaaacccggcagcggggccgggtttctaagcgacagcattttacttgatataatattttgacaaaaccgcaatcaaaacagctacaacaagagatccaataattttccaagtttgattattaagttctttatgtaactcagttttcactgattggatgtcttcttttgaagctagtttatctttgatgatggccacgtcagttacgagagtggcgactttggtttctaaatcttttactctttcaagcatgtcatcacctcctccattcccgctaccatgttgacgattatcgcccatatcctgatcatctgcaatgacaggggctctggttatgatgttgaccgcttcaaccatcagcgcgctccctgcgttttagatacaaaaaaataacactcagctgaatgcaatattttctcattttctatttggtctggggaggaatatatggaacaaaccaccttatgcgcgccttcatttttaacattcaatccaagaagagccatgctttctatgctcacataatcgtcagctgaaggggatgcggcaactaacggttcagccgataacttgtctttggtgtcattcataatactaatgtcttcatggaggacatctacaacaattttatatgttttataggatcttatgaataacccaaaaattattccaagattaattcttcctggaatatttgagactttaatccaaggttctggttgcctaaccaccctggctggatcaccctctctgatttcgtgggtgtaaataaatgatattttttccataaccagacctttatttatatttgctaaatctctatgggctagcagtgggtttacctaagcctcattatttttctgagtgcttttactgactcaattccgtcacgatagatagcgcttatatcatcatgctgttcaggccgttttatcctgtccctgcattgataatatctatcccacacagctttcaattctttgctctttttgttagttactctacgggatagcatttctatgttttggtaaggcagcgggtcgacgcttagcgaatcattgccctcccatatgctttgtatcaactccaattcggctaaaatcggttccgcaatagcattccattctttgcgattatcgttcctcacggcagccttgtagccaaaatagtatgttgcaggtaatgcaacgactgatataattattgcaatagttgcaaccgcatcactgtatgtcatggagatatccctatgtctttctcaggttccgatattcttgccactgtcgcattaattgcttcggttactaacctaacggtcgtcttgtttatgtgctggcgtgcccgaaattggtagggctagcagtgggttagggtattagactaaccgcattttggtttcgacagctacgccaatgattttgcaattcccattaatcggcacaagaggccatgcggggttaagaccacgcaaatatttagctccgccgtcaatgatcagttttttaaatgtagcttcgttagctgtttccagcttcgcaataactagactgccgtttcttgcttctcttccagtatcgaaaagaacgagtgtatcttcaggaatgctaagcccagtaggggctgtcatcgagtcaccctcaacacgcaaccaaaagccattaccttcaattctcgcgtctgactgaaaccactcatcgatatcttttagtgcgtagggttcaatagcttcgcaccatgccccggcactaacccaactgattagtggatatttctcccccttgatattagggccaacgtaagaaaaatttgatggctcctgatcgccaaaaagaatttgagatgccgaaacccccaaaaccttagcgattgtttctgcatcgctagtgcttaattttctagcgccagattcataattcccaattcttgactgtgatttccatccgcacaggcttgccaaggccccttgggtaaggcctttattttctctaaggcttttcagcctttttgcaatttcatcattcgtattcatgcacatctatttaccacaatccgtgttaattggctttcacgatttgtgttgaaattaaaacacaaaacgtgtttaattgaggttgagtgaatcattaaggaaaaccaaatgaatcaaattgccacagtacggaaaaaacttggcgtcactcagtcagttcttgcaaacacctgcggttggaaacagtcacgagttgccaactatgaatcaggtatccgagttcctgatcttgagtcatgtcgtcgaatagtaatggcgcttaatgagttgggaagcaacgacacattagatgaaattttcccgccaaaagctgcatagaaacaccgctctttacacaacttaaccgccctgactcgagggcaccaacaaagtggtcaatcccacggactgactacgcacttaatcagaaagggaagtattacgcatggaacgtgcaagcacacgcaacaaggctcgaatcattgagagccaactactgaacaagattgcattacgaggcgtcactgatattgctgacgctgttggcgttgataagtcacagatatcacgctggaaagaaagcttcattccgaagatatcaatgcttctggctgttttggagtggggagtggtcgatgacgagatggcaaggctggctaagtcagtggcgttgctgctcgcaaaacaaaaatccccggcggccaccagggattcagcagagcagataacaatgtcgttttaactggacaaaacaacaggagtaattatgcgaaagaaaaaaccaaatagcaatacgtcagacgctactcaatatcaacgggcggcaaagcctgatgagcttctcatggtctgcaatgacaaccacgtttttggccgcaagtttgcagagatattccgcggcatagaagcgagaagagggaaggccaatgagtaacgtcttagcgtttcgtcaaccagacacagcaaggccggaggcaaccggtaaggggtttgccttgatgcatagaaaaataatggaactgcccttctacaggacggattctgaggcagttcacctgtggatacatttcatacttaccgctaatcacgcaccggcaatagttaatactgagctgggtgatgtcatggttcgtcgtggagagtttatgactggcagaaataagctggaactggcaaccggtattaccggtaaccgcattaaatatctcatcggtaagtttgaaaaacttgggatgatcaccaagtcaaccaccaagaaattctcattaatttacgtcacaaaatacgacgaatatcagccaaatttagtgccaacagattaccaacaaagtgccaacgcaaagccgcttacgccaagcgctggcgcggaggttgtgccaacagattaccaacaaagtgccacaaacaatgaaataactaataactctattactaacgtaatagagagtccctcttcagccgataaaccggaaaagaaaaaaccgtcattcagttgtgaagatgtggtcaatgcttatcacgacattctgccagaagccaaaggcataagagcactcagtgacaagcgacgcaacctgatcaaaaccttctgggtgaaagccagcaagataactcgccaactggacagccagccattcacgctggaaagctggaaagcctacctgacttacatttccaccaattgccgctggatgctggaagaccgccctgatactcgctccggaaagacgtggcagaaaaaagggttggagtatttcctgaacgatgaaacttatcttcaagtccgagagggggccaaggatgaccgttgattacaaaacaccaccacacaacctcgacgcagaacagagtgttcttggcggcctgatgctggatgacggcagtgataacgttgctaaagtcctgtccatgctgaaacccgaatcgttttacacccgcccgcaccaagttattttttctgaaattaaagacttggttagcaggcagatccctattgaccttctgacactattcaaccagatggagaacaaggggattagcagcactgtaggtggttttgcttacatggcagagctatcgaagaacacccccagcgccgcgaatatcgtgcattacgcgatggaagtacgcgataaggcgatcactcgttacagcattgccaaaacaaatgcgatgaccgagttgctttatgccaacaacggtatgacggcgacccaaaagcttgaggcgatacaggcgctatctaccgagatcacagatcacgccaagacaggtaaccgcagaggactgcgaacattcgagagtgtgttctcagattgggttgatgttgtcgaacaacgactttccggtgacccgcgagctgttgggttaaccagcgggatcgcatcactggacgccatgctggaacctaagcgaattgtgaaagggtcactgttcgtggttggtgcccgccccaaaatgggtaagacaacgctctattcaaacatggctatcaactgcgcactgaatgagaatctcccggcgctggcgtttagccttgaaatgcctgatgtgcagcttggcgaaggcatgatttcccaagcctcaggagtatccagcagtaatttttatcttgatgggtacgacgataaccgttttgcgttggcgtctgcgaaagggttagagctggcgagaagtggcaatctgtacatcgacgatacgccgggactttcactgtctcacatcgtttctgagtgccgccgcatcaagcgcgaacgtggtgttgtaggcatggtattagttgactacctcacactgatgtcagccgaaaaagcagaccgtaatgatctggcttacgggatgatcaccaaggggctaaagaacctcgccaaagaacttgattgcgttgtcgttctgctgactcagctaaaccgtgatttagaaaggcgcgtcaataagcggcctcaaccaagcgactcccgcgacacaggacagattgagcaagactgtgattactggctgggaatataccgcgaaggtgcttacgacgaaaacgccaatcagcaggacaccgaattactactccggcttaaccggcacggcagcggcggggtggtattcgtcgagcaacgtcatggcgcaatctatgactgcaaccaggatcaggctaaagcaaaggcggctgaatctgagcgccggtcaactaaaaaacaaggtggtttctaatggaactgactcgcgaagatgaattaaccattgagcaatatattcgccttgctcacaacggctacaccggcccggtatttatctggcttgaccggctgaaggagcttcacatgaaacgcgcacaactgattgcctggactgctatcacctgcgccagatacgaatcgaagagggctgcatgatggacataactaaatcgcgggaagagtttgaagcttggcttaaatcgaaaatcccaacgacttaccgccttgcatttgagtgtggcgacgatggcgagttaaccaacttagctaaagcgtcagtgttagatatgcggacagcgtggcaagcgtcgcgagaaagcattgaggtggagtttccagaccagcgagatgaaaacttcgacactgataccgcctacaacgaagggttgagtgccaccgccaacgccctccgaactgctggcattcgaatcaagggagagagtgaatgaaaacaacggaagccgtaatgtgcgtagcatgcagatatcaccacttgaagctagagagggttgtcatgagtgatgagtcttctggcaccaaaagaaaatgctgcccaaagtgtggctgtggcgggtttattaacgttgaggtaaagccatgaaagaattagatagatttacatctgagagactagaaagcctttgcgattatcgaccaaacagagtcactaatctgattaatttcagggaaatcgcagcactagcccgcatcgcgttagctgcaaagagggctgagcctgttggttatttagagcaaaaccatttggattatcttcgatccggttctgatgctgatatttggcctgagggcggtgcaggtgatatccctgtctatctcgccccacagttgaactctccggtaattccggaaggttggaaactattaccgaaagaggcaactttagccatgctcacgctattgggattaacaggcagctttgaaagtatgcaagagcgctatgccaatatgctagccgccgcaccggagaagccactatgacaaagcatacctatctactccgaaatacccaggtacgtgacaacgccatagcagcgatccgcagtgtgccgcttgatgagaaaaagccgattgaggttctcattcaggagaagaaacgcagcaatgaccagaatcggaaaatgtggccacttttgcacgacctatcaaaacaggttctctggttcggtgagaagtacgatgaagctgactggaaagacctgattactgcgatggtggctaaggccaaaaatcaggatcagcgtacggctcctggaatcggcggcggggtggtgatgttcggccagcgtactagcaagatgcgagtgagtgagatggtggaggttatcgaggctatctactggttcggcactgagcagggcgtgatattcagcgatgcatccaagctggaaatcgagtgggctaaccggtggggaaatacaccatgcgacaaaggcaaagcagcatagttttcgccctagacaatcttatcttccgcaagacatcccgaaccaaacctaaacccccaatccccgccagcgaaatacccacatatgacgctatctatccgttattagctaaacgctggctaagactcaggagtagaaagaatgcctgatatttaccaaaagattaacggggccgattaccgacgaatatttgtcgttggtgatatccacggctgcctgaataagctcgatgagaaattactctcagtagatttcgatgagagcaaagacttgctgatatccgtaggcgacctgattgaccgaggttcacagaacgtcgaatgcctcgacctgataacgcagccttggtttcgtgcggttcgtggcaatcatgagcaaatggcgattgatgcactggatggaaaatatggaatggctgaatgctgggtagctaacggcggaatgtggtttttctgtctcgaccccgaccaaaaactattggcaaccagcttaattaatcaggccgctgcgctgccgctggtgatcgaagtgacaactgacagcggtaaatatgtagtggcccacgccgactaccctggcaatgaatattattacggaaagccggttagtgaggagcttgttatttggaatcgggatcgcgtgggtgacgctatggatggtttaggtgcagaaataactggggcaaagcagtttatcttcggccatacgccaatgagtaaacccagccaatttaaaaaccaattctatatcgacactggtgcggtatttgggcgtgagttaacagttatccagattcaaggggagcaggcatgactcagttaccgcaatccgtatgcgtgtattgcttcttgatgcttaacaagggtgaaacctacgcccaaaaagaagcggctaagcgagatgtcggcactgggattaatcagataccggatatgtggagttttaccagctcaatgacctcaacaggctggatgaagcgacccgatggtttaattgaacaatggggagaatcatccttttccagatcaaatgaccagtttttttatgctgacgcttttttcccaatagcgttccccaataaagttttaaatatgagtgtgacactccacggcatcaccgatatttcgataataggaaaaacgctcgctgcggatatgttagcaagaacatgggcagcgatcccactgagcaagaaaagcggggaaaacatccctacagcgcaaagagttatgtggcgcgttattggttattaagtgaggtttaaatgaattatttctacagcccagcgaataatgccgcttatccagaatcgttaaaaacggaatatcaggctgcgcaaagttggccggaggatgccgttaaaataacggacgagacttatcagacgttttttgcctgtgcttcgccagccggtaaaaccagaatagccggaaagcaaggccagccagtttgggaggatattcccgtttatgtccctaccgatgatgaattggccgcccgtgctcgccgctatcgcgatgctttcattcaagccaccgatcccatgatggtcagtgattattctattgacgacgtaccgctgacggaagagcagcgcagcgagctaatcgccactcgtttagcgttcaaacagtggccgacgctggcgagctggccgctgattgagttgccagtgattgccgggctggataaatcccgctggctactgacggaagcggtgaataatggctacgtggtgccggtgtggccgccagaatttcgttaaatctttataggccgcatcgttcgtggcctataaaaaatcactcaggctttagtggccactcgatatttggcgcagttgaaacgtcaacacgcatcagcaaaactcgatattttctccactctgtgaggtcagccttttctttttctgtcgcatctcccatatcaacagcatcctgccgccaggcaatttcagaatcagccgcctcccttaatgccttttttttctggacagcgcgatatatcaattcttcaggtgaaggcggtggtatatcaacccatactggccgtccatttaatgaccctatggtcttcctatctggtggagtagttttccagtattcattagattcctcatcagaaagtaaaacagcatcacttggccaggttttcttgttatatgtaccatcatctttccatgctgcaggtatgaatccatttaaattagcgctgtaatataccattgcatttccctcaatatccgatagcaaaaacaagtggattagctgttccaggaactgacccagaaccaaatacttgtgagaatagggtaatagaatttaagttggttgatgtcacttgaaacatttggtcgcatgaccccgtaccattccccagagtggacacgctggagaacacgcaagcagttgggaatgctatagggaacgagagtggacccatggtgctctcaccagtagaggatgggccagcaaaccattgaatgatcaatccaccaggaacatcaggtatgcgaatataatctctggtggttactgttttcggctgttgtgctgagatttgtttccattctgaccatgggcccgccccattccactcagcggtcagaccacggacaaacttcagtcctgagtacgtcgtatactcttgctggcatccataagctgattgcgtgacaagcagtgttccacttgtatttgccgggtagtgcctaccaggagttgcttgagaatcgacggattgataccaaacacccacgcttgacgtaatattaccaaaaccatttaaatctgaagtacccaaagaccctttaatagggaatccactaagatttgacagcgccaaagatggatttgcaatatccgagagattactgattttggcaagaccaccaatatttgtcagggacaaagatggatttgtaacatcagagagattactgattttagcaagagaaccaatgtcattggaggttggtttgttattgggcccgtaaaactcaacccatgatgcccatggccctgatccagtccatgcactagataatccacgaacaaatttacgaccagagtaggctgtatactcttgctggcatccataagctgattgcgtgacaagcagtgttccagatgattgaatcggataattcgccgccgaggttgccaatatgtcggtgggttggtaccacacacccgcagaggttgccctatcacccagcgcatttaaattaattgtcccaagatctcctttagatgcaaacccaccaatatttgatagggactttgaggcattagtaacatcagaaaggttggcgcttttcttcagggcatcagcagcggcggcaatgacttcgccccggcgagctattccctacacaacagcacccgaccaaatgccggggaagattttccccaaacggggggtgggtcatgaaaatgttgaaatcaccggatgtatggatgctcatcattgcctggatagcagaccaccggggtgagttacttagcgcggcactggctgcgttgatggcttacttgcgtggctggtatgccggaggaggtaaaacgcaacgtatgcttgatgcggccatgtgctcagtgatggcatggtttatcaaagatgtattggttatagccgggctgaaccctgactggtcattaattgccagcgtgttcattgggtacatgggtacggattacattggttcggtgctaaagcgcatcgttggcaataagacaggggctgacaatgcaaatcagtagcaccggaatcaatctaataaaacaattcgaaggctgcaaattgacggcatatccagaccctggcaccggcggcgctccctggacaattggttacggctggactcatccagtagatggtaagcccgtggttcgcggcatgactatcgatcagcctaccgccgaccggttgctgaaatgcggagttgtccagttcgagcagggcgttaaccagatgctcaaaatcggcgtaacccagaatcaattcgacgccttggtatcgctggcctacaacatcggaacccgagcgctcagcacatcgacgctgatgaaaaaggtaaacgcgggtgatgcaaagggcgctgcggatgaattcctgaaatggaataaagcaggtgggaaagaaatgaaaggcctgactaatcgccgggcggctgagcgtgagcttttcctgtcatgagtcgcgtaacggcaatactcatcgctgtaacggtggctctgctattcggcctgatgtattaccacgggcaagtaaccaggctacagcgcgacgtctctgacattacccagatagccaacagcagacagtcagccattgacacgatgctaattcagcgccagcaggttgctgctatcgatatcaaatacaccaaggaactggcagatgccaaatctgagaacgagcgccttcgtgctgatatcgctactggtgctaagcggttgcagctcaacgccagctgtaagcgattgcccgaagccacagccacctccagcagcgttgatgatgccagcgccagacttactaacgccgctgaacgggattatctcagtctccgcgagcgaatcggaattgcaaccagccaaataaacggcttgcaggcgtatatcaataacgtttgtcttgcgaggtaagagaaggtggggacagcatccccgctgaattaatcacccaactttgcggtaagggtagccagcttttttgatatgcgcatcaaaatactgccccttagacggtgcgttcattaatgacgtgtgaatggaggccgggactctcgaatattgataaataccgcctcctagaaaagcaatttccaaagtggaacttgcactatcgtaaccaactgaatgaaggtttgaagatgaaacaggttgacgaatcaattgataaatctcctttaagtggcaaaagtgccaaagagatgatcgaacactttaagaaatataacttcgtggatgatcacggacacaggctagacatgtgcttggacttcacagatttgattgaaatggccgtttcgtaggcttgttaggcaaaaaaacacaaaaggctcgacttaggtcgggctttttttatgcagtaaatccagcgcatcgcagcgcaaatcactcagaacctttcaggatgacccttgaggaaccggctggctgtcggagccttctgagggccgtattcctgtgcgaacaaggttcatcactaaaaggtatatccgaatgaacattatccctcttagctataaaggcgaatcagtacgctttaacactgaaggttgggtaaacgtcactgacgttgctgagaaatttggtaagcgcatcgacaactggatgaggctgatttgaaacgcttgaatacatccgggcgctggatgaggcaatgactggtgtggagtctgaaattctacatccctcgaaatgcaggtatgtaaaaaccagtaaggcgagaaaggatcgcggaggtggtacatggcttcatccaaagctatcggtcgcttttgcgcgttggtgcgatgctcggttcgctgtctggtgtgatttgcatatagatagcttgttgcgtggtgagctaacggagcagcaaaactatgaccaggcctgccgaattcgcgatgaccggaaatcaaaagcaagtggtggtgcacgagaaatggcacgttggcgctgggacaaacctgccctagaagcaaccgtggaattctggcaggagcaactgaagttaacgctcgatattgccagctaaaagaaaaactgagagccactttcacaacggctctccattaactaaaagcactcatatatcagataggcgatcccgaccaaagaggccatccctgtaaaggttagccccaatgccagggtggagtagctcactgttgcagccatgtaccaacttttaaatttagcccacatagtcatcatcctttttgttttgcaaaagaatgacagtcaaatcagagggatggaaattggttgtacagatcaataatcggctattgatcgtttaaaacgatcgttgaacaacgagacgggtcaactccgtcaagccgtagcaaggctgctatctcgctttattgcaggccacggattcaaatttgaagtaaggaaatgatggtgaccgataaaactgagtttgctcgcgtcgttccagaaataattcaagataaggccagcgattggctgcttgggaagcttgatgaagaacttgatgcgttaagagatttgggggcatcaggggtagacattactcaaattctacccggatccatcaggggggctaagtttagagccgaacttattagagaaacctttatcacgcagtattcagacgagaaataaccatggcaagcctgacacagaagcaagagacattctgtcaggcatacatcgaaacgggtaatgcttctgaggcatatcggacggcgtatgctgctgacaagatgaaacctgagaccattaaccggaaagctaaagagtcattagacaacggcaagatcacggcaaggattgccgaattgcagggtgagattaagcagcgccatcacgtcactgttgactctttgattagagaattggaagaggctcggaaatcagctttagcggctgagacgccacaatcatcagcagccgtagccgcaacaatgggcaaggccaagttgaccggcctggacaaagtgattgtcgagctgagtggcggagttaaggtcgagcacaaatctattaaggacatcttcgatggctaatccacatttcaagccattcgccgaaagcgctccatacaaaatagcttacggcggccgtggaagtgggaagtcatatttctttgcggaacttgccgtggaggttgcacgacgcattaacacggtaattttgtgtactcgcgagtttcagggttctattagcgactcagtccacaaattgctatgtgagactatcgatcgtctcggttattccacagaattcgaaatccagaaaaacacaatcattcacctagcaaccggtgctagcttcgtattctccggcattaaaaacaacgtcacaaaaataaaatccatacagggcgttggaatctgctgggtagaagaggccgaggcggtaacaaaagactcatgggatgtactgattccatccatacgaggcgacaaacactcagagatatgggtgagctttaacccgaagaacattcttgacgatacgtatcagcgcttcatcgtcaggcctcctgctggggcgattgttctgaaagccaattacaacgacaaccctcacttccatgactcaccgctccctgcgcaaatggctgaatgcaaagaacgtgattacgacctttacctgcacatttgggaaggtgagccggttgccgacagtgacttggcaattatcaagccatcgtggattgctgccgctatagatgcccataaactgattggcttcgccccttctggtcgtaagcgagtcggttttgacgtagcagatgaaggcgaggatagcaacgctacaacactggcccacggctctgttgtcatggactgccagcagtggaacaagggtgatgtaatcacatcatctgatcgcgtcaaaaactacgcagaaagcgtcacagcaagcgagattgtttacgactccattggcgtgggtgcaggcgtaaaagctcacctgaggcgcgtctgtgcgataccgtccagcggatttaacgcaggtgctgccgtattcaaaccagatgctaaatatgctgaaggcaagaccaataaagacatgttctccaatatcaaggctcaggcatggtggggagtccgtgatcgcttcttcaatacatggcgagtggttaagcacctcgaagccaaccccaacgacaaagaattcatcaaacaattttcagacgatcagctaatcagccttagctccggcattaaacaactggaatacctcaaggctgagctgtcacgcccatgggttgactacgacaataacggtcgcgtgaaggttgagagcaagaaagacatgaagaagcgtggcataccgtcaccaaatatggcggactcgctaatcatggcatttgctccggcgcacaaaccattcaacattcctgacgagatactgcaatgacaagaaagaaggctgtgcgaacagctcaagccgtgcaagcacctcggcgggaactggcgaagattacaaatgcgcatcttgatgcggcgtctgctgcgaatggcgagaagccatttgctgagtttaagcgttacgaaccgctaccaggtgtgattccagaagataaagaagaatccgctctagcgatggactccacgccttacgatgtcatcaacggcatgtttattggtggtgaatattctggctttcgtggctaccctattttggcggcaatgtctcagcaggttgagtatgcgaacatgcataccatcatggctgacgagatgacgcgaaactggattgaggtgaagagcaccaaagagggtgatcctgatatcgacctaatggataaggcgctgaccaaatacgacattaagcgcttgattcacgaagccgtaaggcaggactcagagtatggcgtggcacacatctttattgatgttggcgccgatgaccttgagaacgaaaaacccctatttctagacccgcgcaagataactaaaggctcacttaaaggctttcgttgcgtagaccctaattgggtttatccggcgatgtacaactcaaacaaaccgcttaggccagatttctacaaaccccaagcatggttcgtgatgggggatacggtgcatgagtctcgattcatcgatatcgttagccgcccagtgcccgacattctaaaaccatcatataacttcggcggtctttcgctgacgcagttaatggaggattacgttgttgactggcgagatgcgaagaagaacgtgataaagattcttcgaactcttcgaatgcgggcgctgaagacggatatggatgctaggttagaaatccctggtgaatttgataagcgcattaaaatgttcaccaagtatcaggataactttggtatatgggctctcgatactgaagaggatctgattcatatgcagacatcactgagtgagctgtcaagcatcctatcgaattaccaagagcaactctgcataccatcacgcaccaccaacctgaagatgtttggtaacgccccagcaggtttgaatgccagtggggatgctgagattgagacgtggcacgaaacgatatccggctcgcaagaactggactatcgcagagccattgagaacatcttcaagattatccagctttcagagtttggcgaactgaagcccgacatctacttcgagtttaaaccgcttgatgaggtcagcgatgatgaccgtgccaacaccaacaagactcgcgttgaaaccgtggttgctgctgctgatagcatgctgattaactctgaagaggcgcgagacgcactgaaaagcattgaaggtgcaggattcgaaaacctgaagggtgactatgaaccggaaaccgaagaagagtagaagccttcgggcggtcaactataacgccggtaatatcatttggtatcgcagagagttactggctgttatcagagaaatgaatgacgatgttaagaaacaaatcgtcccgatatttgaagataacccactggcgatggacgctaacccggttcaattgttgcgtagtgctttgcgtgctctgtctaggaagtgggtagagcgcttcattaagatggcgctacctactgccgaatcagtgacaaacaagactggcgaggctgttgaccgctcattacttgctgctgcccgtaaagactcaatgacaattaacatgcagtggactgaggctatgctcgaaaagcgagaggctatcatttcagagaatgtggcgttaatccgctccattcctgagaagtatttcactgaagtggaatcgatggtgtttcgctcagtagccaagggtggcgaccgcaaaggattggctgacgaaatggaagctaactttggcaagcgtcatggtattactcgcaggcgtgctgaattcattgcacgtgaccaggtacgcaaggctaccagcgcactatccaacgcaaggcaacaagcggcagggattaagcgaggcatctggttacacagtggcggcggtagcgaaccccgcaagaagcacgttcatgctaacgggaaggagttcgacctagataagggcctgccaatcggtgacaaagggcagcatgtgttgccgggtgaagagcctaattgcgggtgtgtatggaagccagtattgccattctgaaaatataaaacgaacaaggtcgcttaggcggccttttttattgcccgaaaaacaggaaagaacatgaaagatgtgaagtttgccttcgataaggcgagcgttcgtcgctatgacgttgacgggatgcttcatgttgaactgacgcctatcagcaaggctaacgtctgcgtctactacggcaaagagatacccgattgggaagcgttaggccttaaccctgacaaggcataccggttgctacgtgaccctgaagaactcaggaaagccgctccaacattcaacaacaaaccagttctagacactcacatcgctgtgtcggtaattgacccgccaaaagaacacattattggttcgactggcactgacgcagtgtacgaagctccgtatctgaagaattcgatgggcatttacgacatcaattccattatcggcgtagagaacaaacagcagcgagaaatctcatcttcataccgttatcggctcgacatgacgccgggcgagtacgagggcgaaccatacgatggcgttatgcgtgacatcgtttgtaaccatgtggcaatcgtgccaagtggccgggctggcccggatgtatttgtatatgactcactacctacaggactcaaactgatgtcaaaaatcaaacaactcatgagcatcttcaagccgctgatggctaacgatgccgaccctgaagctgtaaagaaagcggaagaggacgtggaaaagctcatcaaagacgacgagaaagaccccaaaacagcgaaggacgagatgaccgacgaagaaaaagaaaagttagccaaagacgaagcggagcaggctgagaaagacaagttagccaaagatgaggctgatagagccgataaagagaagatggcaaatgacagtaaattagctatggattcagcgattaaagccgttgaagcccgcgcagccgcgcttcgtcaggcagaacatgatattcagccgatcaagcatcatgcgattattgacatagcaatattgcatctcgctaggcgttcgggcagcgctggggtcggccacccagccacgaatattcaaatcaccgtgctgccatgaaatcgccagcgcatgttgcaggaaggccgggccgcaaatactggccaaacgacgttcatgctgcgaaggatctggggccgctcgatattggcgaaccagcttgccgttgtgagtgaggtgaatcgccacgtcgaagcgcgccaacgcgatgcggcgtaccacttcatcaatatggccgaattcggttttttccgtgcgcataaatttacgccgcgctggcgtgttataaaacaaatccagcacttccagcgtactgcctaccggatgggcggcgggtttgatggtcaccgccatatcccgcccttcggcgtaagcctgccaggcttcgttctgttcggcggtacgcgaggtcagcatcaaacgggaaaccgagctaatactggccaacgcctcaccgcgaaagcccatgctgagaatggcctccagatcttccaacgaactgattttactggttgcatggcgcgctaacgccagcgataagtcgtctttagctatcccacagccgttatcacggatgcggattaattttgcgccacctttctcaatatcaatatcgattcgcgtggcaccagcatccagactgttttccaccaactcctttactaccgacgcaggccgctctaccacttcaccggcggcaatttggttggcgagttgtggcggtaatatctgaatcggcataacaaatcccttcggttaagactgtggaatggtgagcgtttggccgagttgtaccgaaccagacttcagcttattcacgcgttgaatctcactttgagatacaccatatttcgccgcaatagcggataaagtatccccgcgtttaacctgatgcttgatcggtttggccgggctgattttcttcaccgcaggcaccttggcgacgctagctaccgcgctgccagatgcgggaattcgcaggcgctgcccaacccataccacgtctttcttcagcgtattattctgccgcatcgccgccatactgacaccgtactggctggcaatgccggatagagtttcaccccgttttaccatgtgaatcagcgatttaccgctaatggtggctttccccccactgctgaccgcactgactaccgggccaggctgattaacaccactttgacgcgctgacctttcaaccgccgctgttgcgcccagcggacggttttcgacctttgggtcggcttgtagcggatgcgacaggaaataactgcgcaagcctttgtaaatcgcttgggcaattttatcctgatacgcactgctgccgagcagccgctcctccgtaccattactgataaagccggtttccactaataaagagggaatgtccggtgaacgcaacacgccaagactggcgtgttccggcctacgtttatgaatagaaccaatggcttgaagctcatgtagcacttttaccgctacgtcgtaacccacccgctgggagtgaccaaattgtaaatccagcaccgcctgactgagataaggatcggc
